(19) United States
(12) Patent Application Publication
(10) Pub. No.: US 2011/0107457 A1
(43) Pub. Date: May 5, 2011

(54) METHOD FOR PRODUCING A TRANSGENIC PLANT CELL, A PLANT OR A PART THEREOF WITH INCREASED RESISTANCE TO PLANT DISEASE

(75) Inventors: Markus Frank, Neustadt (DE); Gunnar Plesch, Potsdam (DE); Piotr Puzio, Mariakerke (BE); Robert Ascenzi, Cary, NC (US); Volker Mittendorf, Hillsborough, NC (US)

(73) Assignee: BASF Plant Science GmbH, Ludwigshafen (DE)

(21) Appl. No.: 12/674,922

(22) PCT Filed: Sep. 1, 2008
(86) PCT No.: PCT/EP08/61494

§ 371 Date: Feb. 24, 2010

Related U.S. Application Data
(60) Provisional application No. 60/969,190, filed on Aug. 31, 2007.

(30) Foreign Application Priority Data
Aug. 27, 2008 (EP) 08163071.7

(51) Int. Cl. C12N 15/82; A01H 5/00; C12N 15/11; C12N 5/10

(52) U.S. Cl. 800/279; 435/468; 536/23.1; 435/320.1; 435/419; 800/301

(57) ABSTRACT

The invention relates to the control of pathogens. Disclosed herein are methods of producing transgenic plants with increased pathogen resistance, expression vectors comprising polynucleotides encoding for functional proteins, and transgenic plants and seeds generated thereof.

[0001] This application claims priority benefit of U.S. provisional patent application Ser. No. 60/969,190, filed Aug. 31, 2007 and EP08163071, filed Aug. 27, 2008.

[0002] The invention relates to the control of pathogens. Disclosed herein are methods of producing transgenic plants with increased pathogen resistance, expression vectors comprising polynucleotides encoding for functional proteins, and transgenic plants and seeds generated thereof.

[0003] In particular, this invention relates to a transgenic plant cell, a plant or a part thereof with increased resistance to pathogenic fungi and/or nematodes as compared to a corresponding non-transformed wild type control, by increasing or generating one or more activities of biotic stress related protein (BSRP) and to a method for producing said plant cell, a plant or a part thereof.

[0004] The invention also deals with methods of producing and screening for and breeding such plant cells or plants.

[0005] Population increases and climate change have brought the possibility of global food, feed, and fuel shortages into sharp focus in recent years. Additionally, plant performance in terms of growth, development, biomass accumulation and yield depends under field conditions on acclimation ability to the environmental changes and tolerance to plant diseases.

Stresses, biotic and abiotic, exert a critical influence on crop yields. Pathogen attacks are sometimes the most devastating biotic stresses. The enhancement of disease resistance in crops can contributed significantly to increasing the productivity of crops and decreasing the application of pesticides, which can adversely affect human health and the environment when applicated in excess.
Plant diseases are infectious diseases which are caused by biotic stress and noninfectious diseases caused by abiotic stress.
Biotic stress is caused by phytopathogenes respective bacteria, fungi, nematodes, viruses, mollicutes (mycoplasmas, spiroplasmas), protozoa, phanerogams; rickettsias, and viroids, insects and parasitic plants.
Abiotic stress means “sub-optimal growing condition”, referring to environmental stress, damages by weather and other environmental factors, limited water and nutrient availability and sub-optimal disposability. Limited water availability can induce drought, heat, cold or salt stress.

[0006] Plants infectious diseases, in other words biotic stress, are responsible for significant crop losses worldwide, resulting from both infection of growing plants and destruction of harvested crops. Crop losses and crop yield losses of major crops such as rice, maize (corn) and wheat caused by these stresses represent a significant economic and political factor and contribute to food shortages worldwide.

[0007] Agricultural biotechnology has attempted to meet humanity's growing needs through genetic modifications of plants that could increase crop yield, for example, by conferring better tolerance to biotic and abiotic stress or by increasing biomass. The plants' natural defense mechanisms against pathogens are frequently insufficient.

At the moment many genetical and biotechnological approaches are known in order to obtain plants growing under conditions of biotic stress.

[0008] The introduction of foreign genes from plants, animals or microbial sources can increase the defenses. Examples are the protection against feeding damage by insects by expressing Bacillus thuringiensis endotoxins (Vaeck et al. (1987) Nature 328:33-37) or the protection against fungal infection by expressing a bean chitinase (Broglie et al. (1991) Science 254:1194-1197).

[0009] Most pathogens are host-specific to a particular plant species, genus or family. For instance, blackspot of rose will not attack marigolds or lettuce. Therefore, most of the approaches described only offer resistance to a single pathogen or a narrow spectrum of pathogens.

Plant-pathogen interactions are sometimes controlled by specific interactions between avirulence genes of pathogens and gene-for-gene disease resistance (R) genes of plants. Many authors have reported the enhancement of disease resistance by transgenic approaches, as increasing the expression of the disease resistance (R) genes of plants. The characteristic defense reaction of R-gene mediated resistance is the hypersensitive response (HR), a strong resistance reaction comprising a programmed cell death of the attacked plant cell. Small antimicrobial peptides play an important role as part of the natural defense systems of plants against infectious microorganisms. Antimicrobial peptides are usually small, cationic, and amphipathic and have open-chain forms. Various types of antimicrobial peptides have been identified in plants, including thionins, maize zeamatin, coffee circulin, and wheat puroindoline and plant defensins (Kawata et. al, JARQ 37 (2), 71-76 (2003)).

[0010] Only a few approaches exist which impart a resistance to a broader spectrum of pathogens to plants. Systemic acquired resistance (SAR)—a defense mechanism in a variety of plant/pathogen interactions—can be conferred by the application of endogenous messenger substances such as jasmonic acid (JA) or salicylic acid (SA) (Ward, et al. (1991) Plant Cell 3:1085-1694; Uknes, et al. (1992) Plant Cell 4(6):645-656). Similar effects can also be achieved by synthetic compounds such as 2,6-dichloroisonicotinic acid (INA) or S-methyl benzo(1,2,3)thiadiazole-7-thiocarboxylate (BTH; Bion200) (Friedrich et al. (1996) Plant J 10(1):61-70; Lawton et al. (1996) Plant J. 10:71-82). The expression of pathogenesis-related (PR) proteins, which are upregulated in the case of SAR, may also cause pathogen resistance in some cases.

[0011] In barley, the loss of the Mlo gene causes an increased and, above all, race-unspecific resistance against a large number of mildew species (Buschges R et al. (1997) Cell 88:695-705; Jorgensen J H (1977) Euphytica 26:55-62; Lyngkjaer M F et al. (1995) Plant Pathol 44:786-790). mlo-like resistances in other plants, in particular in cereal species, are not described. Various methods using the Mlo gene and homologs from other cereal species for obtaining a pathogen resistance are described (WO 98/04586; WO 00/01722; WO 99/47552). The disadvantage is that the mlo-mediated defense mechanism comprises a spontaneous die-off of leaf cells (Wolter M et al. (1993) Mol Gen Genet 239: 122-128). Another disadvantage is that the Mlo-deficient genotypes show hypersensitivity to hemibiotrophic pathogens such as Magnaporte grisea (M. grisea) and Cochliobolus sativus (Bipolaris sorokiniana) (Jarosch B et al. (1999) Mol Plant Microbe Interact 12:508-514; Kumar J et al. (2001) Phytopathology 91:127-133).

[0012] The liberation of reactive oxygen species (ROS) is ascribed an important protection function in the reaction on plant pathogens (Wojtaszek P (1997). It has been shown that mutations in the catalytic subunit of NADPH oxidase in Arabidopsis thaliana show a reduced accumulation of reactive oxygen intermediates (ROI). With regard to the hypersensitive reaction (HR), the results were heterogeneous: while infection with the aviralulent and bactrium Pseudomonas syringae showed a reduced HR in a double mutant, the virulent oomycete Peronospora parasitica showed an increased HR. (Torres M A et al. (2002) Proc Natl Acad Sci USA 99:517-522). In US 20080047033 methods for generating or increasing a pathogen resistance in plants by reducing the expression, activity or function of an NADPH oxidase is disclosed.

[0013] An other approach is directed to pathogenesis-related proteins (PRPs), in particular to the constitutive expression in transgenic plants of DNA sequences which encode the PRPs The pathogenesis-related proteins are plant proteins induced following infection by a pathogen.

Such PRPs are disclosed in US 20080120747 or US 20080090294, whereby the species of origin of these nematicidal and antifungal polypeptides are plant species. Further plant genes involved in plant resistance are known from U.S. Pat. No. 7,320,892; US 20080184397 or US 20070226839 for example.

[0014] With view to the fact that plant disease constitutes a major and ongoing threat to human food stocks and animal feed, a need exists to identify methods conferring a resistance and/or tolerance to a broad spectrum of plant diseases.

Most ideal such a resistance and/or tolerance should be conferred by a protein, which can be formed by plant cells directly by translation of at least one gene, two or more or combination of genes.

[0015] Accordingly, in a first embodiment, the present invention provides a method for producing a transgenic plant cell with these traits by placing the “disease resistance conferring protein” DROP at disposal.

[0016] Some approaches which impart a resistance to a broader spectrum of pathogens to plants are based on enhanced tolerance to abiotic environmental factors that cause a plant to be stressed. This stress may result in the plant's gradual decline. Decline results in the plant being more susceptible to infectious diseases. So the real cause of a problem is the abiotic stress factors, with the infectious disease simply being a secondary factor.

[0017] There is still a need to identify genes coding for polypeptides with a activity, which, when generated or increased, confers increased biotic stress resistance in plants or plant cells as compared to a corresponding non-transformed wild type control not only under conditions of abiotic stress. The increased biotic stress resistance should be directed primarily and straight to the biotic stress factor.

[0018] Accordingly, in one embodiment, the present invention provides the “disease resistance conferring protein” DROP which confers increased biotic stress resistance primarily and straight to the biotic stress factor.

[0019] Biotic stress is caused and induced by pathogens.

[0020] A large group of plant pathogens of agro-economical importance are fungi. Fungi are responsible for devastating epidemics which can result in substantial losses of crops of various plant species. Fungal infection of crop plants has repeatedly resulted in catastrophic harvest failures that have caused major economic and social problems in the affected countries. Among the causal agents of infectious crop plant diseases, phytopathogenic fungi play a dominant role. The potential for serious crop epidemics still persists today. In addition to causing food shortages, fungal infection of plants can directly affect the health of humans and livestock through poisoning by toxins.

[0021] The classes with plant disease-causing fungi are Plasmodiophoromycetes, Chytridiomycetes, Zygomycetes, Oomycetes, Ascomycetes, Basidiomycetes, and Deuteromycetes.

[0022] Additionally, many fungal species may be significant as potential contaminants of food.

[0023] From the genus of ascomycete fungi Alternaria species are known as major plant pathogens. At least 20% of agricultural spoilage is caused by Alternaria species. They are also common allergens in humans, growing indoors and causing hay fever or hypersensitivity reactions that sometimes lead to asthma.

[0024] Species in the genus Alternaria (Dematiaceae family, Hyphomycetes order, Fungi Imperfecti;

Kingdom: Fungi; Phylum: Ascomycota; Class: Euascomycetes; Order: Pleosporales; Family: Pleosporaceae; Genus: Alternaria) are very common and abundant. Alternaria infects the plant in the field and may contaminate wheat, sorghum, and barley. Alternaria species also infect various fruits and vegetables and can cause spoilage of these foods in refrigerated storage. Alternaria in general, have a world-wide geographic distribution.
A. brassicicola causes black spot disease (also called dark leaf spot) on virtually every important cultivated Brassica species including broccoli, cabbage, canola, and mustard. It is of worldwide economic importance resulting occasionally in 20-50% yield reductions in crops such as canola, mustard or rape.
A. alternata causes foliage and pod blight of pea, leaf spot on Calathea spp. as well as late blight on tomato and potato.
Dark symptoms are signs of the pathogen, Alternaria spp., that have dark-colored mycelium and erect conidiophores that bear single or branched chains of conidia. Seed, seedlings, leaves and pods can be damaged. Infection can occurs when seeds are sown in infected soils, but can also occur when the seeds themselves are infected.
Therefore, there is a need to identify safe and effective compositions and methods for controlling plant pathogens, in particular pathogenic fungi, specially from the genus Alternaria and for the production of plants, in particular seeds, having increased resistance to plant pathogens, and ultimately for the increased yield.

[0025] A further large group of plant pathogens of agro-economical importance are nematodes. Nematodes are microscopic roundworms that feed on the roots, leaves and stems of more than 2,000 row crops, vegetables, fruits, and ornamental plants, causing an estimated $100 billion crop loss worldwide. A variety of parasitic nematode species infect crop plants, including root-knot nematodes (RKN), cyst- and lesion-forming nematodes. Root-knot nematodes, which are characterized by causing root gall formation at feeding sites, have a relatively broad host range and are therefore pathogenic on a large number of crop species. The cyst- and lesion-forming nematode species have a more limited host range, but still cause considerable losses in susceptible crops.

Pathogenic nematodes are present throughout the United States, with the greatest concentrations occurring in the warm, humid regions of the South and West and in sandy soils. Soybean cyst nematode (Heterodera glycines), the most serious pest of soybean plants, was first discovered in the United States in North Carolina in 1954. Some areas are so heavily infested by soybean cyst nematode (SCN) that soybean production is no longer economically possible without control measures. Although soybean is the major economic crop attacked by SCN, SCN parasitizes some fifty hosts in total, including field crops, vegetables, ornamentals, and weeds.
Signs of nematode damage include stunting and yellowing of leaves, and wilting of the plants during hot periods. Nematode infestation, however, can cause significant yield losses without any obvious above-ground disease symptoms. The primary causes of yield reduction are due to underground root damage. Roots infected by SCN are dwarfed or stunted. Nematode infestation also can decrease the number of nitrogen-fixing nodules on the roots, and may make the roots more susceptible to attacks by other soil-borne plant pathogens.
The nematode life cycle has three major stages: egg, juvenile, and adult. The life cycle varies between species of nematodes. For example, the SCN life cycle can usually be completed in 24 to 30 days under optimum conditions whereas other species can take as long as a year, or longer, to complete the life cycle. When temperature and moisture levels become favorable in the spring, worm-shaped juveniles hatch from eggs in the soil. Only nematodes in the juvenile developmental stage are capable of infecting soybean roots.
The life cycle of SCN has been the subject of many studies, and as such are a useful example for understanding the nematode life cycle. After penetrating soybean roots, SCN juveniles move through the root until they contact vascular tissue, at which time they stop migrating and begin to feed. With a stylet, the nematode injects secretions that modify certain root cells and transform them into specialized feeding sites. The root cells are morphologically transformed into large multinucleate syncytia (or giant cells in the case of RKN), which are used as a source of nutrients for the nematodes. The actively feeding nematodes thus steal essential nutrients from the plant resulting in yield loss. As female nematodes feed, they swell and eventually become so large that their bodies break through the root tissue and are exposed on the surface of the root.
After a period of feeding, male SCN nematodes, which are not swollen as adults, migrate out of the root into the soil and fertilize the enlarged adult females. The males then die, while the females remain attached to the root system and continue to feed. The eggs in the swollen females begin developing, initially in a mass or egg sac outside the body, and then later within the nematode body cavity. Eventually the entire adult female body cavity is filled with eggs, and the nematode dies. It is the egg-filled body of the dead female that is referred to as the cyst. Cysts eventually dislodge and are found free in the soil. The walls of the cyst become very tough, providing excellent protection for the approximately 200 to 400 eggs contained within. SCN eggs survive within the cyst until proper hatching conditions occur. Although many of the eggs may hatch within the first year, many also will survive within the protective cysts for several years.
A nematode can move through the soil only a few inches per year on its own power. However, nematode infestation can be spread substantial distances in a variety of ways. Anything that can move infested soil is capable of spreading the infestation, including farm machinery, vehicles and tools, wind, water, animals, and farm workers. Seed sized particles of soil often contaminate harvested seed. Consequently, nematode infestation can be spread when contaminated seed from infested fields is planted in non-infested fields. There is even evidence that certain nematode species can be spread by birds. Only some of these causes can be prevented.
Traditional practices for managing nematode infestation include: maintaining proper soil nutrients and soil pH levels in nematode-infested land; controlling other plant diseases, as well as insect and weed pests; using sanitation practices such as plowing, planting, and cultivating of nematode-infested fields only after working non-infested fields; cleaning equipment thoroughly with high pressure water or steam after working in infested fields; not using seed grown on infested land for planting non-infested fields unless the seed has been properly cleaned; rotating infested fields and alternating host crops with non-host crops; using nematicides; and planting resistant plant varieties.
Methods have been proposed for the genetic transformation of plants in order to confer increased resistance to plant parasitic nematodes. U.S. Pat. Nos. 5,589,622 and 5,824,876 are directed to the identification of plant genes expressed specifically in or adjacent to the feeding site of the plant after attachment by the nematode. However, these patents do not provide any specific nematode genes that are useful for conferring resistance to nematode infection.
Despite several advances in some fields of plant biotechnology, success in achieving a pathogen resistance in plants has been very limited. Yield losses due to pathogens, in particular as a result of nematode attack, are a serious problem. Current practice to reduce nematode infestation is limited primarily to an intensive application of nematicides. Therefore, there is a need to identify safe and effective compositions and methods for controlling plant pathogens, in particular nematodes, and for the production of plants having increased resistance to plant pathogens, and ultimately for the increased yield.

[0026] The present invention fulfills the need for plants that are resistance to plant disease, preferably pathogenic fungi and/or nematodes as compared to a corresponding non-transformed wild type control, and concomitantly, demonstrate increased yield. The transgenic plants of the present invention comprise microbial genes and their homologs that confer the phenotype of increased pathogen resistance when expressed in the plant.

[0027] Accordingly, in a first embodiment, the present invention provides a method for producing a transgenic plant cell, a plant or a part thereof with increased resistance to plant disease, preferably pathogenic fungi and/or nematodes as compared to a corresponding non-transformed wild type control, wherein the method comprises the steps of:

a) introducing into a plant cell a polynucleotide encoding a “disease resistance conferring protein” DROP from yeast and/or Escherichia
b) generating from the plant cell the transgenic plant expressing the polynucleotide.
In one embodiment, the present invention provides a method for producing a transgenic plant cell, a plant or a part thereof with increased resistance to plant disease, preferably pathogenic fungi and/or nematodes as compared to a corresponding non-transformed wild type control, wherein the method comprises the overexpression of microbial genes coding for DROP.
In one embodiment, the present invention provides a method for producing a transgenic plant cell, a plant or a part thereof with increased resistance to plant disease, preferably pathogenic fungi and/or nematodes as compared to a corresponding non-transformed wild type control, wherein the method comprises the overexpression homologs of the of microbial genes coding for DROP.
The term “increased expression” or “overexpression” as used herein means any form of expression that is additional to the original wild-type expression level.

[0028] In one embodiment of the invention said DROP has an activity selected from the group consisting of:

GTPase, non-essential small GTPase,
transcription regulator gabP 3′ region, transcriptional repressor with DNA-binding Winged helix domain 35 (GntR family) and DNA-binding transcriptional dual regulator protein.

[0029] In one embodiment the present invention provides a method for producing a transgenic plant cell, a plant or a part thereof with increased resistance to plant disease and ultimately increased yield; as compared to a corresponding non-transformed wild type control.

In one embodiment the present invention provides a method for producing a transgenic plant cell, a plant or a part thereof with increased resistance and/or tolerance to stress as compared to a corresponding non-transformed wild type control.
In one embodiment the present invention provides a method for producing a transgenic plant cell, a plant or a part thereof with increased yield as compared to a corresponding non-transformed wild type control, preferably under stress conditions.

[0030] In one embodiment the term “increased yield” refers to any biomass increase.

In one embodiment increased yield and/or increased biomass production includes higher seed yield, higher photosynthesis and/or higher dry matter production.
In one embodiment of the invention the terms “increased yield”, “increased biomass” or “increased biomass production” means that the plants exhibit an increased growth rate from the starting of first stress condition as compared to a corresponding non-transformed wild type plant. An increased growth rate comprises an increased in biomass production of the whole plant, an increase in biomass of the visible part of the plant, e.g. of stem and leaves and florescence, visible higher and larger stem.
In one embodiment increased yield and/or increased biomass production includes higher seed yield, higher photosynthesis and/or higher dry matter production.

[0031] Said increased yield in accordance with the present invention can typically be achieved by enhancing or improving, in comparison to a non-transformed starting or wild-type plant, one or more yield-related traits of a plant. Such yield-related traits of a plant the improvement of which results in increased yield comprise, without limitation, the increase of the intrinsic yield capacity of a plant, improved nutrient use efficiency, and/or increased stress tolerance.

According to the present invention, yield-related traits concerning an increase of the intrinsic yield capacity of a plant may be manifested by improving the specific (intrinsic) seed yield (e.g. in terms of increased seed/grain size, increased ear number, increased seed number per ear, improvement of seed filling, improvement of seed composition, embryo and/or endosperm improvements, or the like); modification and improvement of inherent growth and development mechanisms of a plant (such as plant height, plant growth rate, pod number, pod position on the plant, number of internodes, incidence of pod shatter, efficiency of nodulation and nitrogen fixation, efficiency of carbon assimilation, improvement of seedling vigour/early vigour, enhanced efficiency of germination (under stressed or non-stressed conditions), improvement in plant architecture, cell cycle modifications, photosynthesis modifications, various signalling pathway modifications, modification of transcriptional regulation, modification of translational regulation, modification of enzyme activities, and the like); and/or the like.
According to the present invention, yield-related traits concerning an improvement or increase in nutrient use efficiency of a plant may be manifested by improving a plant's general efficiency of nutrient assimilation (e.g. in terms of improvement of general nutrient uptake and/or transport, improving a plant's general transport mechanisms, assimilation pathway improvements, and the like), and/or by improving specific nutrient use efficiency of nutrients including, but not limited to, phosphorus, potassium, and nitrogen.
According to the present invention, yield-related traits concerning an improvement or increase of stress tolerance of a plant may be manifested by improving or increasing a plant's tolerance against biotic and/or abiotic stress. In the present application, biotic stress refers generally to plant pathogens and plant pests comprising, but not limited to, fungal diseases (including oomycete diseases), viral diseases, bacterial diseases, insect infestation, nematode infestation, and the like. In the present application, abiotic stress refers generally to abiotic environmental conditions a plant is typically confronted with, including conditions which are typically referred to as “abiotic stress” conditions including, but not limited to, drought (tolerance to drought may be achieved as a result of improved water use efficency), heat, low temperatures and cold conditions (such as freezing and chilling conditions), salinity, osmotic stress, shade, high plant density, mechanical stress, oxidative stress, and the like.

[0032] The term “yield” as used herein generally refers to a measurable produce from a plant, particularly a crop.

Yield and yield increase (in comparison to a non-transformed starting or wild-type plant) can be measured in a number of ways, and it is understood that a skilled person will be able to apply the correct meaning in view of the particular embodiments, the particular crop concerned and the specific purpose or application concerned.

[0033] In the preferred embodiments of the present invention described herein, an increase in yield refers to increased biomass yield, increased seed yield, and/or increased yield regarding one or more specific content(s) of a whole plant or parts thereof or plant seed(s).
In preferred embodiments, “yield” refers to biomass yield comprising dry weight biomass yield and/or freshweight biomass yield, each with regard to the aerial and/or underground parts of a plant, depending on the specific circumstances (test conditions, specific crop of interest, application of interest, and the like). In each case, biomass yield may be calculated as freshweight, dry weight or a moisture adjusted basis, and on the other hand on a per plant basis or in relation to a specific area (e.g. biomass yield per acre/square meter/or the like).
In other preferred embodiments, “yield” refers to seed yield which can be measured by one or more of the following parameters: number of seed or number of filled seed (per plant or per area (acre/square meter/or the like)); seed filling rate (ratio between number of filled seeds and total number of seeds); number of flowers per plant; seed biomass or total seed weight (per plant or per area (acre/square meter/or the like); thousand kernel weight (TKW; extrapolated from the number of filled seeds counted and their total weight; an increase in TKW may be caused by an increased seed size, an increased seed weight, an increased embryo size, and/or an increased endosperm); or other parameters allowing to measure seed yield. Seed yield may be determined on a dry weight or on a fresh weight basis, or typically on a moisture adjusted basis, e.g. at 15.5 percent moisture.
In further preferred embodiments, yield refers to the specific content and/or composition of a harvestable product, including, without limitation, an enhanced and/or improved sugar content or sugar composition, an enhanced or improved starch content and/or starch composition, an enhanced and/or improved oil content and/or oil composition (such as enhanced seed oil content), an enhanced or improved protein content and/or protein composition (such as enhanced seed protein content), an enhanced and/or improved vitamin content and/or vitamin composition, or the like.
In a preferred meaning according to the present application, “yield” as described herein may also refer to the harvestable yield of a plant, which largely depends on the specific plant/crop of interest as well as its intended application (such as food production, feed production, processed food production, biofuel, biogas or alcohol production, or the like) of interest in each particular case. Thus, yield may also be calculated as harvest index (expressed as a ratio of the weight of the respective harvestable parts divided by the total biomass), harvestable parts weight per area (acre, squaremeter, or the like); and the like.
Preferably, the preferred enhanced or improved yield characteristics of a plant described herein according to the present invention can be achieved in the absence or presence of stress conditions.
The meaning of “yield” is, thus, mainly dependent on the crop of interest and the inteded application, and it is understood, that the skilled person will understand in each particular case what is meant from the circumstances of the description.

[0034] As used herein, the term “stress” refers to any sub-optimal growing condition and includes biotic and abiotic stress.

Generally, the term “increased tolerance to stress” can be defined as survival of plants, and/or higher yield production, under stress conditions as compared to a non-transformed wild type or starting plant.
The resistance and/or tolerance to abiotic stress of the transformed cells of the invention is disclosed in WO2004/092398, which is incorporated by reference.

[0035] In one embodiment the term “increased yield” refers to increased yield under condition of abiotic stress as compared to a corresponding non-transformed wild type control.

Increased yield is achieved due to enhanced resistance and/or tolerance to abiotic stress as compared to a corresponding non-transformed wild type control.

[0036] Abiotic stress preferably includes sub-optimal conditions associated with drought, cold or salinity or combinations thereof. In preferred embodiments, abiotic stress is drought and low water content. Wherein drought stress means any environmental stress which leads to a lack of water in plants or reduction of water supply to plants.

In one embodiment of the invention the term “increased resistance to abiotic stress” relates to an increased resistance to water stress, which is produced as a secondary stress by cold, and/or salt, and/or, of course, as a primary stress during drought.

[0037] In one embodiment increased abiotic stress resistance refers to resistance to drought.

In the present invention, enhanced tolerance to drought may, for example and preferably, be determined according to the following method:
Transformed plants are grown in pots in a growth chamber (e.g. York, Mannheim, Germany). In case the plants are Arabidopsis thaliana soil is prepared as 4:1 (v/v) mixture of soil and quartz sand. Standard growth conditions are: photoperiod of 16 h light and 8 h dark, 20° C., 60% relative humidity, and a photon flux density of 150 μE. To induce germination, sown seeds are kept at 4° C., in the dark, for 3 days. Plants are watered daily until they were approximately 3 weeks old at which time drought was imposed by withholding water. Parallely, the relative humidity was reduced in 10% increments every second day to 20%. After approximately 12 days of withholding water, most plants show visual symptoms of injury, such as wilting and leaf browning, whereas tolerant plants can be identified as being visually turgid and healthy green in color. Plants are scored for symptoms of drought injury in comparison to neighbouring plants for 3 days in succession.
Three successive experiments can be conducted. In the first experiment, 10 independent T2 lines are sown for each gene being tested. The percentage of plants not showing visual symptoms of injury is determined. In the second experiment, the lines that are scored as tolerant in the first experiment are put through a confirmation screen according to the same experimental procedures. In this experiment, plants of each tolerant line are grown and treated as before. In the third experiment, at least 7 replicates of the most tolerant line are grown and treated as before. The average and maximum number of days of drought survival after wild-type control have visually died are determined. Additionally measurements of chlorophyll fluorescence are made in stressed and non-stressed plants using a Mini-PAM (Heinz Walz GmbH, Effeltrich, Germany).

[0038] In one embodiment the term “increased yield” refers to increased yield under condition of biotic stress, e.g. increased resistance and/or tolerance to plant disease, preferably pathogenic fungi and/or nematodes as compared to a corresponding non-transformed wild type control.

Increased yield is achieved due to enhanced resistance and/or tolerance to biotic stress as compared to a corresponding non-transformed wild type control.

[0039] Biotic stress preferably includes sub-optimal conditions associated with plant disease.

Resistance to biotic stress refers to resistance of a plant to plant disease as compared to a corresponding non-transformed wild type control. Biotic stress and concomitantly the plant disease are caused by pathogens, that include insects, fungi, bacteria, viruses, nematodes, viroids, mycloplasmas, etc, preferably pathogenic fungi and/or nematodes.
“Plant pathogen” refers to any agent that causes a disease state in a plant, including viruses, fungi, bacteria, nematodes, and other microorganisms.
Resistance to biotic stress or “pathogen resistance” denotes the reduction or weakening of disease symptoms of a plant following infection by a pathogen. The symptoms can be manifold, but preferably comprise those which directly or indirectly have an adverse effect on the quality of the plant, the quantity of the yield, the suitability for use as feedstuff or foodstuff, or else which make sowing, planting, harvesting or processing of the crop difficult. Pathogen caused disease symptoms include size and/or frequency of necrotic or chlorotic lesions on plant tissue, brown lesions, often with light tan to whitish centers, with dark purplish to black outer margin, eventually with chlorotic zone surrounding the lesion; size and/or frequency of cankers, black spot disease (also called dark leaf spot), foliage, blight etc.

[0040] In one embodiment increased biotic stress resistance refers to resistance to plant disease, preferably pathogenic fungi and/or nematodes.

In the present invention, enhanced tolerance to pathogenic fungi may, for example and preferably, be determined according to the following method:
Transformed plants are grown in pots in a growth chamber (e.g. York, Mannheim, Germany). In case the plants are Arabidopsis thaliana nutrient rich soil (GS90, Tantau, Wansdorf, Germany) is used. Pots are filled with soil and placed into trays. Water is added to the trays to let the soil take up appropriate amount of water for the sowing procedure. The seeds for transgenic Arabidopsis thaliana C24 plants are sown in pots (10 cm diameter). Then the filled tray is covered with a transparent lid without holes and transferred into the shelf system of the growth chamber. Lid and pots are sprayed daily. Stratification is established for a period of 4 days in the dark at 4° C. for 8 h, in the light (220 μmol/m²s) at 20° C. for 16 h, relative humidity with 68%. After 4 days the parameter are changed to 12 h light and 12 h darkness and covers are removed. In case the transgenic plants contain the bar marker gene, BASTA selection is done at day 5, 7, 10 and 12 after sowing by spraying pots with plantlets from the top. Therefore, a 0.02% (v/v) solution of BASTA concentrate (183 g/l glufosinate-ammonium) in tap water is sprayed. The location of the trays inside the chambers is changed on working days after sowing. Watering is done as necessary after covers is removed from the trays. Plants are piqued 14 days after sowing in another pot with GS90, 5 plants together in 1 pot and 3 pots per line. 4 lines and 1 wild type (in the middle) can be placed together in 1 tray. The tray is covered with the lid and sprayed for 3 days. Positive (sensitive=pad3-1-wt-F1-(1)) and negative (resistant=Col-0-Lehle-F1-(1)) controls can be in an extra tray. 28 days after sowing phenotypic information is valued in case of plants differ from the wild type control. 31 days after sowing tap water is added in the tray in a height of 1 cm. A day later plants are sprayed 3 times with the fungal spore suspensions preferably Alternaria brassicicola or Alternaria alternate (1,5×10⁶ spores/ml) and covered again. Lid are sprayed 2 times a day with water for 2 days. 3 and 4 days after inoculation the evaluation were done.
The disease symptoms can be scored in comparison to untransformed wild type control plants. The range of scoring can be between 1 and 5. Leafs with symptoms of chlorotic areas and mazaration of the tissue are counted of all three pots. The phenotype (bigness and habitus) of the plants have an influence to the final scoring.

[0041] In one embodiment increased biotic stress resistance refers to resistance to plant disease, preferably pathogenic fungi and/or nematodes.

In the present invention, enhanced tolerance to nematodes may, for example and preferably, be determined according to the following method:
In case the plants are Arabidopsis thaliana, seeds from selected C24 Arabidopsis lines containing a microbial gene to be tested are packaged in filter paper envelopes and given an arbitrary identifier and used for primary screening. Primary screening consisted of the following steps: 1) sterilization by chlorine gas, 2) growth on selective media; 3) transfer to assay plates; 4) inoculation of seedlings in assay plates with defined amount J2 larvae; 5) counting of J4 female nematodes and cysts and 6) analysis of results; and 7) selection of lead lines.
Sterilized seeds consisting of a population segregating for expression of a microbial test gene are grown on Petri dishes containing Murashige Skoog medium with the appropriate selection agent added (glufosinate (Bayer Crop Science Kansas City, Mo.), imazethapyr (BASF Corporation, RTP, NC); or kanamycin, depending on the marker gene present in the Arabidopsis line). The Petri dishes are placed at 4° C. for 72 hours and then transferred to a 22° C. growth chamber. After 10 days, seedlings are selected on the basis of size and color. Individual seedlings containing the transgene designed to express a microbial test gene are green and have fully expanded cotyledons. These individuals are selected for transfer to assay plates. Selected seedlings from are transferred to 12 well assay plates containing 0.2 strength Knop medium solidified with 0.8% Daishin agar (Sijmons et al 1991), and maintained in a 24° C. growth chamber for 10 days with a 16 h photoperiod. At least two plates containing controls are used for each set of inoculations.
Transferred seedlings are grown under the same conditions for 10 additional days and then inoculated with a defined number (90-100) of sterilized Heterodera schachtii J2 larvae. Inoculated seedlings are maintained a growth chamber for an additional 28 days.
After 28 days, plates are removed observed under a dissecting scope. The numbers of mature females (J4 females and adult-stage cysts) are counted and results recorded. A root score of 1-5 can be assigned to each inoculated seedling with 1 being small and 5 being large. In addition, high-resolution images can be taken on the day of inoculation and the day of counting.
Recorded results can be subjected to statistical analysis using a SAS software package (SAS, Cary, N.C.). Analysis of results reveale sets of lines within groups inoculated with a particular batch of nematodes that have lower (putative resistant lines) or higher (putative hyper-susceptible lines) female numbers. Lines with a lower number of mature females are selected from sets inoculated with nematode batches resulting in a mean value of 10 mature females per seedling.
Seeds from lead lines selected on the basis of primary screening are packaged in filter paper envelopes and given an arbitrary identifier and used in a validation assay (secondary screen). A validation assay consisted of the same steps as above with the exceptions described as follows.
For the infection assay, 20 seedlings per line are transferred to 6-well plates containing Knop medium in order to allow greater root development relative to 12-well plates. Each plate can containe two seedlings from a line and two controls. Thus, each plate containes two test lines and all replicates and corresponding controls for a given line are present on 10 plates. The seedlings are inoculated with a greater number (250) of sterile J2 larvae relative to the first screen. These larvae are produced from in vitro root cultures and therefore the sterilization described above is not necessary. Mature females are counted as described in the previous example and data analyzed by a t-test using the SAS software package (SAS, Cary, N.C.). Only those lines having corresponding controls averaging at least 20 J4 females per well, and showing a 25% difference from control plates with a p<0.05 are considered to be a validated lead.

[0042] In one embodiment the invention provides plants with broad spectrum stress resistance as compared to a corresponding non-transformed wild type control.

In one embodiment “broad spectrum” resistance refers to enhanced resistance against at least two, three, four, or more stress conditions. Stress conditions can be abiotic and/or biotic stress. Preferably the plants according to the invention have a increased resistance to drought, pathogenic fungi and nematodes.
In one embodiment “broad spectrum” resistance refers to enhanced resistance against at least two, three, four, or more pathogens of different pathogen species. Preferably the pathogens are selected from the group consisting of pathogenic fungi and nematodes.

[0043] In one embodiment of the invention pathogenic fungi and the disease with which they are associated are selected from the group consisting of:

Plasmodiophoromycota such as Plasmodiophora brassicae (clubroot of crucifers), Spongospora subterranea (powdery scab of potato tubers), Polymyxa graminis (root disease of cereals and grasses),
Oomycota such as Bremia lactucae (downy mildew of lettuce), Peronospora (downy mildew) in snapdragon (P. antirrhini), onion (P. destructor), spinach (P. effusa), soybean (P. manchurica), tobacco (“blue mold”; P. tabacina), alfalfa and clover (P. trifolium), Pseudoperonospora humuli (downy mildew of hops), Plasmopara (downy mildew in grapevines) (P. viticola) and sunflower (P. halstedii), Sclerophtohra macrospora (downy mildew in cereals and grasses), Pythium (seed rot, seedling damping-off, and root rot of all types of plants, for example damping-off of Beta beet caused by P. debaryanum), Phytophthora infestans (blight in potato, brown rot in tomato and the like), Albugo spec. (white rust on cruciferous plants) or Phytophthora sojae.
Ascomycota such as Microdochium nivale (snow mold of rye and wheat), Fusarium graminearum, Fusarium culmorum (partial ear sterility mainly in wheat), Fusarium oxysporum (Fusarium wilt of tomato), Blumeria graminis (powdery mildew of barley (f.sp. hordei) and wheat (f.sp. tritici)), Erysiphe pisi (powdery mildew of pea), Nectria galligena (Nectria canker of fruit trees), Uncinula necator (powdery mildew of grapevine), Pseudopeziza tracheiphila (red fire disease of grapevine), Claviceps purpurea (ergot on, for example, rye and grasses), Gaeumannomyces graminis (take-all on wheat, rye and other grasses), Magnaporthe grisea (rice blast disease), Pyrenophora graminea (leaf stripe of barley), Pyrenophora teres (net blotch of barley), Pyrenophora tritici-repentis (leaf blight of wheat), Venturia inaequalis (apple scab), Sclerotinia sclerotium (stalk break, stem rot), Pseudopeziza medicaginis (leaf spot of alfalfa, white and red clover) or Mycoshaerella fijiensis (Black Sigatoka disease), Fusarium rots (Fusarium moniliforme and F. graminearum) and Anthracnose stalk rot (Colletotrichum graminicola), Diplodia stalk rot (Diplodia maydis), charcoal stalk rot (Macrophomina phaseolina).
Basidiomycetes such as Typhula incarnata (typhula blight on barley, rye, wheat), Ustilago maydis (blister smut on maize), Ustilago nuda (loose smut on barley), Ustilago tritici (loose smut on wheat, spelt), Ustilago avenae (loose smut on oats), Rhizoctonia solani (rhizoctonia root rot of potato), Sphacelotheca spp. (head smut of sorghum), Melampsora lini (rust of flax), Puccinia graminis (stem rust of wheat, barley, rye, oats), Puccinia recondita (leaf rust on wheat), Puccinia dispersa (brown rust on rye), Puccinia hordei (leaf rust of barley), Puccinia coronata (crown rust of oats), Puccinia striiformis (yellow rust of wheat, barley, rye and a large number of grasses), Uromyces appendiculatus (brown rust of bean), Sclerotium rolfsii (root and stem rots of many plants) or Phakopsora pachyrhizi (soybean rust).
Deuteromycetes (Fungi imperfecti) such as Septoria nodorum (glume blotch) of wheat (Septoria tritici), Pseudocercosporella herpotrichoides (eyespot of wheat, barley, rye), Rynchosporium secalis (leaf spot on rye and barley), Alternaria solani (early blight of potato, tomato), Phoma betae (blackleg on Beta beet), Cercospora beticola (leaf spot on Beta beet), Alternaria brassicae (black spot on oilseed rape, cabbage and other crucifers), Alternaria alternata (Alternaria leaf spot; Tobacco brown spot; Apple core rot; Tomato fruit rot; Bean leaf blight; Apple storage rot; Pear storage rot), Verticillium dahliae (verticillium wilt), Colletotrichum lindemuthianum (bean anthracnose), Phoma lingam (blackleg of cabbage and oilseed rape), Botrytis cinerea (gray mold of grapevine, strawberry, tomato, hops and the like).
More preferred are Phytophthora infestans (potato blight, brown rot in tomato and the like), Microdochium nivale (previously Fusarium nivale; snow mold of rye and wheat), Fusarium graminearum, Fusarium culmorum (partial ear sterility of wheat), Fusarium oxysporum (Fusarium wilt of tomato), Blumeria graminis (powdery mildew of barley (f. sp. hordei) and wheat (f. sp. tritici)), Magnaporthe grisea (rice blast disease), Sclerotinia sclerotium (stalk break, stem rot), Septoria nodorum and Septoria tritici (glume blotch of wheat), Alternaria brassicae (black spot of oilseed rape, cabbage and other crucifers), Phoma lingam (blackleg of cabbage and oilseed rape) and Alternaria alternata (Alternaria leaf spot; Tobacco brown spot; Apple core rot; Tomato fruit rot; Bean leaf blight; Apple storage rot; Pear storage rot).
Most preferred are Alternaria brassicae and Alternaria alternata.

[0044] In one embodiment of the invention pathogenic nematodes and the corresponding crop plants endangered are listed in Index of Plant Diseases in the United States (U.S. Dept. of Agriculture Handbook No. 165, 1960); Distribution of Plant-Parasitic Nematode Species in North America (Society of Nematologists, 1985); and Fungi on Plants and Plant Products in the United States (American Phytopathological Society, 1989). For example, plant parasitic nematodes that are targeted by the present invention include, without limitation, cyst nematodes and root-knot nematodes. Specific plant parasitic nematodes which are targeted by the present invention include, without limitation, Heterodera glycines, Heterodera schachtii, Heterodera avenae, Heterodera oryzae, Heterodera cajani, Heterodera trifolii, Globodera pallida, G. rostochiensis, or Globodera tabacum, Meloidogyne incognita, M. arenaria, M. hapla, M. javanica, M. naasi, M. exigua, Ditylenchus dipsaci, Ditylenchus angustus, Radopholus similis, Radopholus citrophilus, Helicotylenchus multicinctus, Pratylenchus coffeae, Pratylenchus brachyurus, Pratylenchus vulnus, Paratylenchus curvitatus, Paratylenchus zeae, Rotylenchulus reniformis, Paratrichodorus anemones, Paratrichodorus minor, Paratrichodorus christiei, Anguina tritici, Bidera avenae, Subanguina radicicola, Hoplolaimus seinhorsti, Hoplolaimus Columbus, Hoplolaimus galeatus, Tylenchulus semipenetrans, Hemicycliophora arenaria, Rhadinaphelenchus cocophilus, Belonolaimus longicaudatus, Trichodorus primitivus, Nacobbus aberrans, Aphelenchoides besseyi, Hemicriconemoides kanayaensis, Tylenchorhynchus claytoni, Xiphinema americanum, Cacopaurus pestis, and the like.

[0045] In one embodiment this invention fulfills in part the need to identify new, unique genes capable of conferring increased resistance to stress, preferably to plant disease, preferably pathogenic fungi and/or nematodes as compared to a corresponding non-transformed wild type control, upon expression or over-expression of endogenous and/or exogenous genes.

[0046] Accordingly, the present invention relates to a method for producing a transgenic plant cell, a plant or a part thereof with increased resistance to stress, preferably to plant disease, preferably pathogenic fungi and/or nematodes as compared to a corresponding non-transformed wild type control, which comprises
[0047] (a) increasing or generating one or more activities selected from the group consisting of: GTPase, non-essential small GTPase,
   [0048] transcription regulator gabP 3′ region, transcriptional repressor with DNA-binding Winged helix domain 35 (GntR family) and DNA-binding transcriptional dual regulator protein. in plant cell, a plant or a part thereof, and
[0049] (b) growing the plant cell, a plant or a part thereof under conditions which permit the development of a plant with increased resistance to stress, preferably to plant disease, preferably pathogenic fungi and/or nematodes as compared to a corresponding non-transformed wild type plant.

[0050] In a preferred embodiment the present invention relates to a method for producing a transgenic plant cell, a plant or a part thereof with increased resistance to stress, preferably to plant disease, preferably pathogenic fungi and/or nematodes as compared to a corresponding non-transformed wild type plant cell, a plant or a part thereof, which comprises increasing or generating one or more activities of a polypeptide selected from the group consisting of:
[0051] (i) a polypeptide comprising a polypeptide, a consensus sequence or at least one polypeptide motif as depicted in column 5 or 7 of Table II or of Table IV, respectively; or
[0052] (ii) an expression product of a nucleic acid molecule comprising a polynucleotide as depicted in column 5 or 7 of Table I,
[0053] (iii) or a functional equivalent of (i) or (ii).

[0054] In a preferred embodiment the present invention relates to a method for producing a transgenic plant cell, a plant or a part thereof with increased resistance to stress, preferably to plant disease, preferably pathogenic fungi and/or nematodes as compared to a corresponding non-transformed wild type plant cell, a plant or a part thereof, which comprises increasing or generating the expression of at least one nucleic acid molecule comprising a nucleic acid molecule selected from the group consisting of:
[0055] (a) a nucleic acid molecule encoding the polypeptide shown in column 5 or 7 of Table II;
[0056] (b) a nucleic acid molecule shown in column 5 or 7 of Table I;
[0057] (c) a nucleic acid molecule, which, as a result of the degeneracy of the genetic code, can be derived from a polypeptide sequence depicted in column 5 or 7 of Table II and confers an increased resistance to plant disease, preferably pathogenic fungi and/or nematodes as compared to a corresponding non-transformed wild type control plant cell, a plant or a part thereof;
[0058] (d) a nucleic acid molecule having at least 30% identity with the nucleic acid molecule sequence of a polynucleotide comprising the nucleic acid molecule shown in column 5 or 7 of Table I and confers an increased resistance to plant disease, preferably pathogenic fungi and/or nematodes as compared to a corresponding non-transformed wild type control plant cell, a plant or a part thereof;
[0059] (e) a nucleic acid molecule encoding a polypeptide having at least 30% identity with the amino acid sequence of the polypeptide encoded by the nucleic acid molecule of (a) to (c) and having the activity of a polypeptide encoded by a nucleic acid molecule comprising a polynucleotide as depicted in column 5 of Table I and confers an increased resistance to plant disease, preferably pathogenic fungi and/or nematodes as compared to a corresponding non-transformed wild type control plant cell, a plant or a part thereof;
[0060] (f) nucleic acid molecule which hybridizes with a nucleic acid molecule of (a) to (c) under stringent hybridization conditions and confers an increased resistance to plant disease, preferably pathogenic fungi and/or nematodes as compared to a corresponding non-transformed wild type control plant cell, a plant or a part thereof;
[0061] (g) a nucleic acid molecule encoding a polypeptide which can be isolated with the aid of monoclonal or polyclonal antibodies made against a polypeptide encoded by one of the nucleic acid molecules of (a) to (e) and having the activity represented by the nucleic acid molecule comprising a polynucleotide as depicted in column 5 of Table I;
[0062] (h) a nucleic acid molecule encoding a polypeptide comprising the consensus sequence or one or more polypeptide motifs as shown in column 7 of Table IV and preferably having the activity represented by a polypeptide comprising a polypeptide as depicted in column 5 of Table II or IV;
[0063] (i) a nucleic acid molecule encoding a polypeptide having the activity represented by a protein as depicted in column 5 of Table II and confers an increased resistance to plant disease, preferably pathogenic fungi and/or nematodes as compared to a corresponding non-transformed wild type control plant cell, a plant or a part thereof;
[0064] (j) nucleic acid molecule which comprises a polynucleotide, which is obtained by amplifying a cDNA library or a genomic library using the primers in column 7 of Table III and preferably having the activity represented by a polypeptide comprising a polypeptide as depicted in column 5 of Table II or IV;
   [0065] and
[0066] (k) a nucleic acid molecule which is obtainable by screening a suitable nucleic acid library under stringent hybridization conditions with a probe comprising a complementary sequence of a nucleic acid molecule of (a) or (b) or with a fragment thereof, having at least 15 nt, preferably 20 nt, 30 nt, 50 nt, 100 nt, 200 nt or 500 nt of a nucleic acid molecule complementary to a nucleic acid molecule sequence characterized in (a) to (e) and encoding a polypeptide having the activity represented by a protein comprising a polypeptide as depicted in column 5 of Table II.

[0067] Unless otherwise noted, the terms used herein are to be understood according to conventional usage by those of ordinary skill in molecular biology. In addition to the definitions of terms provided below, definitions of common terms in molecular biology may also be found in Rieger et al., 1991 Glossary of genetics: classical and molecular, 5^{th} Ed., Berlin: Springer-Verlag; and in Current Protocols in Molecular Biology, F. M. Ausubel et al., Eds., Current Protocols, a joint venture between Greene Publishing Associates, Inc. and John Wiley & Sons, Inc., (1998 Supplement).

Throughout this application, various publications are referenced. The disclosures of all of these publications and those references cited within those publications in their entireties are hereby incorporated by reference into this application in order to more fully describe the state of the art to which this invention pertains. A number of standard molecular biology techniques are described in Sambrook and Russell, 2001 Molecular Cloning, Third Edition, Cold Spring Harbor, Plainview, N.Y.; Sambrook et al., 1989 Molecular Cloning, Second Edition, Cold Spring Harbor Laboratory, Plainview, N.Y.; Maniatis et al., 1982 Molecular Cloning, Cold Spring Harbor Laboratory, Plainview, N.Y.; Wu (Ed.) 1993 Meth. Enzymol. 218, Part I; Wu (Ed.) 1979 Meth Enzymol. 68; Wu et al., (Eds.) 1983 Meth. Enzymol. 100 and 101; Grossman and Moldave (Eds.) 1980 Meth. Enzymol. 65; Miller (Ed.) 1972 Experiments in Molecular Genetics, Cold Spring Harbor Laboratory, Cold Spring Harbor, N.Y.; Old and Primrose, 1981 Principles of Gene Manipulation, University of California Press, Berkeley; Schleif and Wensink, 1982 Practical Methods in Molecular Biology; Glover (Ed.) 1985 DNA Cloning Vol. I and II, IRL Press, Oxford, UK; Hames and Higgins (Eds.) 1985 Nucleic Acid Hybridization, IRL Press, Oxford, UK; and Setlow and Hollaender 1979 Genetic Engineering: Principles and Methods, Vols. 1-4, Plenum Press, New York.

[0068] As used herein and in the appended claims, the singular form “a”, “an”, or “the” includes plural reference unless the context clearly dictates otherwise. As used herein, the word “or” means any one member of a particular list and also includes any combination of members of that list.

The term “cell” or “plant cell” as used herein refers to single cell, and also includes a population of cells. The population may be a pure population comprising one cell type. Likewise, the population may comprise more than one cell type. A plant cell within the meaning of the invention may be isolated (e.g., in suspension culture) or comprised in a plant tissue, plant organ or plant at any developmental stage.
The term “tissue” with respect to a plant (or “plant tissue”) means arrangement of multiple plant cells, including differentiated and undifferentiated tissues of plants. Plant tissues may constitute part of a plant organ (e.g., the epidermis of a plant leaf) but may also constitute tumor tissues (e.g., callus tissue) and various types of cells in culture (e.g., single cells, protoplasts, embryos, calli, protocorm-like bodies, etc.). Plant tissues may be in planta, in organ culture, tissue culture, or cell culture.
The term “organ” with respect to a plant (or “plant organ”) means parts of a plant and may include, but not limited to, for example roots, fruits, shoots, stems, leaves, hypocotyls, cotyledons, anthers, sepals, petals, pollen, seeds, etc.
The term “plant” as used herein can, depending on context, be understood to refer to whole plants, plant cells, plant organs, plant seeds, and progeny of same. The word “plant” also refers to any plant, particularly, to seed plant, and may include, but not limited to, crop plants. Plant parts include, but are not limited to, stems, roots, shoots, fruits, ovules, stamens, leaves, embryos, meristematic regions, callus tissue, gametophytes, sporophytes, pollen, microspores, hypocotyls, cotyledons, anthers, sepals, petals, pollen, seeds and the like. The term “plant” as used herein can be monocotyledonous crop plants, such as, for example, cereals including wheat, barley, sorghum, rye, triticale, maize, rice, sugarcane, and trees including apple, pear, quince, plum, cherry, peach, nectarine, apricot, papaya, mango, poplar, pine, sequoia, cedar, and oak. The term “plant” as used herein can be dicotyledonous crop plants, such as pea, alfalfa, soybean, carrot, celery, tomato, potato, cotton, tobacco, pepper, canola, oilseed rape, beet, cabbage, cauliflower, broccoli, lettuce and Arabidopsis thaliana. The class of plants that can be used in the method of the invention is generally as broad as the class of higher and lower plants amenable to transformation techniques, including angiosperms (monocotyledonous and dicotyledonous plants), gymnosperms, ferns, horsetails, psilophytes, bryophytes, and multicellular algae. The plant can be from a genus selected from the group consisting of Medicago, Solanum, Brassica, Cucumis, Solanum, Juglans, Gossypium, Malus, Vitis, Antirrhinum, Populus, Fragaria, Arabidopsis, Picea, Capsicum, Chenopodium, Dendranthema, Pharbitis, Pinus, Pisum, Oryza, Zea, Triticum, Triticale, Secale, Lolium, Hordeum, Glycine, Pseudotsuga, Kalanchoe, Beta, Helianthus, Nicotiana, Cucurbita, Rosa, Fragaria, Lotus, Medicago, Onobrychis, trifolium, Trigonella, Vigna, Citrus, Linum, Geranium, Manihot, Daucus, Raphanus, Sinapis, Atropa, Datura, Hyoscyamus, Nicotiana, Petunia, Digitalis, Majorana, Ciahorium, Lactuca, Bromus, Asparagus, Antirrhinum, Heterocallis, Nemesis, Pelargonium, Panieum, Pennisetum, Ranunculus, Senecio, Salpiglossis, Browaalia, Phaseolus, Avena, and Allium.

[0069] The term “transgenic” as used herein is intended to refer to cells and/or plants which contain a transgene, or whose genome has been altered by the introduction of at least one transgene, or that have incorporated exogenous genes or polynucleotides. Transgenic cells, tissues, organs and plants may be produced by several methods including the introduction of a “transgene” comprising at least one polynucleotide (usually DNA) into a target cell or integration of the transgene into a chromosome of a target cell by way of human intervention, such as by the methods described herein.

[0070] The term “wild type” as used herein refers to a plant cell, seed, plant component, plant tissue, plant organ, or whole plant that has not been genetically modified or treated in an experimental sense.

The term “control plant” as used herein refers to a plant cell, an explant, seed, plant component, plant tissue, plant organ, or whole plant used to compare against transgenic or genetically modified plant for the purpose of identifying an enhanced phenotype or a desirable trait in the transgenic or genetically modified plant. A “control plant” may in some cases be a transgenic plant line that comprises an empty vector or marker gene, but does not contain the recombinant polynucleotide of interest that is present in the transgenic or genetically modified plant being evaluated. A control plant may be a plant of the same line or variety as the transgenic or genetically modified plant being tested, or it may be another line or variety, such as a plant known to have a specific phenotype, characteristic, or known genotype. A suitable control plant would include a genetically unaltered or non-transgenic plant of the parental line used to generate a transgenic plant herein.
The term “non-transformed wild type control” according to the invention is a wild type which was genetically modified or treated by the method of the invention, so that it can be used as a control for the plant cell of the invention.
The term “syncytia site” as used herein refers to the feeding site formed in plant roots after nematode infestation. The site is used as a source of nutrients for the nematodes. A syncytium is the feeding site for cyst nematodes and giant cells are the feeding sites of root knot nematodes.

[0071] In accordance with the invention, the plant may be a plant selected from the group consisting of monocotyledonous plants and dicotyledonous plants. The plant can be from a genus selected from the group consisting of maize, wheat, rice, barley, oat, rye, sorghum, banana, and ryegrass. The plant can be from a genus selected from the group consisting of pea, alfalfa, soybean, carrot, celery, tomato, potato, cotton, tobacco, pepper, oilseed rape, beet, cabbage, cauliflower, broccoli, lettuce and Arabidopsis thaliana.

[0072] The present invention also provides a transgenic seed which is true breeding for a polynucleotide described above, parts from the transgenic plant described above, and progeny plants from such a plant, including hybrids and inbreds. The invention also provides a method of plant breeding, e.g., to develop or propagate a crossed transgenic plant. The method comprises crossing a transgenic plant comprising a particular expression vector of the invention with itself or with a second plant, e.g., one lacking the particular expression vector, and harvesting the resulting seed of a crossed plant whereby the harvested seed comprises the particular expression vector. The seed is then planted to obtain a crossed transgenic progeny plant. The plant may be a monocot or a dicot. The crossed transgenic progeny plant may have the particular expression vector inherited through a female parent or through a male parent. The second plant may be an inbred plant. The crossed transgenic plant may be an inbred or a hybrid. Also included within the present invention are seeds of any of these crossed transgenic plants and their progeny.

[0073] Another embodiment of the invention relates to an expression vector comprising one or more transcription regulatory elements operably linked to one or more polynucleotides described above, wherein expression of the polynucleotide confers increased pathogen resistance to a transgenic plant. In one embodiment, the transcription regulatory element is a promoter capable of regulating constitutive expression of an operably linked polynucleotide. A “constitutive promoter” refers to a promoter that is able to express the open reading frame or the regulatory element that it controls in all or nearly all of the plant tissues during all or nearly all developmental stages of the plant. Constitutive promoters include, but are not limited to, the ³⁵S CaMV promoter from plant viruses (Franck et al., 1980 Cell 21:285-294), the Nos promoter (An G. at al., The Plant Cell 3:225-233, 1990), the ubiquitin promoter (Christensen et al., Plant Mol. Biol. 12:619-632, 1992 and 18:581-8, 1991), the MAS promoter (Velten et al., EMBO J. 3:2723-30, 1984), the maize H3 histone promoter (Lepetit et al., Mol. Gen. Genet. 231:276-85, 1992), the ALS promoter (WO96/30530), the 19S CaMV promoter (U.S. Pat. No. 5,352,605), the super-promoter (U.S. Pat. No. 5,955,646), the figwort mosaic virus promoter (U.S. Pat. No. 6,051,753), the rice actin promoter (U.S. Pat. No. 5,641,876), and the Rubisco small subunit promoter (U.S. Pat. No. 4,962,028).

In accordance with the invention, the transcription regulatory element may be a regulated promoter. A “regulated promoter” refers to a promoter that directs gene expression not constitutively, but in a temporally and/or spatially manner, and includes both tissue-specific and inducible promoters. Different promoters may direct the expression of a gene or regulatory element in different tissues or cell types, or at different stages of development, or in response to different environmental conditions.
A “tissue-specific promoter” or “tissue-preferred promoter” refers to a regulated promoter that is not expressed in all plant cells but only in one or more cell types in specific organs (such as leaves or seeds), specific tissues (such as embryo or cotyledon), or specific cell types (such as leaf parenchyma or seed storage cells). These also include promoters that are temporally regulated, such as in early or late embryogenesis, during fruit ripening in developing seeds or fruit, in fully differentiated leaf, or at the onset of sequence. Suitable promoters include the napin-gene promoter from rapeseed (U.S. Pat. No. 5,608,152), the USP-promoter from Vicia faba (Baeumlein et al., 1991 Mol Gen Genet. 225(3):459-67), the oleosin-promoter from Arabidopsis (WO 98/45461), the phaseolin-promoter from Phaseolus vulgaris (U.S. Pat. No. 5,504,200), the Bce4-promoter from Brassica (WO 91/13980) or the legumin B4 promoter (LeB4; Baeumlein et al., 1992 Plant Journal, 2(2):233-9) as well as promoters conferring seed specific expression in monocot plants like maize, barley, wheat, rye, rice, etc. Suitable promoters to note are the Ipt2 or Ipt1-gene promoter from barley (WO 95/15389 and WO 95/23230) or those described in WO 99/16890 (promoters from the barley hordein-gene, rice glutelin gene, rice oryzin gene, rice prolamin gene, wheat gliadin gene, wheat glutelin gene, maize zein gene, oat glutelin gene, Sorghum kasirin-gene and rye secalin gene). Promoters suitable for preferential expression in plant root tissues include, for example, the promoter derived from corn nicotianamine synthase gene (US 20030131377) and rice RCC3 promoter (U.S. Ser. No. 11/075,113). Suitable promoter for preferential expression in plant green tissues include the promoters from genes such as maize aldolase gene FDA (US 20040216189), aldolase and pyruvate orthophosphate dikinase (PPDK) (Taniguchi et. al., Plant Cell Physiol. 41(1):42-48, 2000).
“Inducible promoters” refer to those regulated promoters that can be turned on in one or more cell types by an external stimulus, for example, a chemical, light, hormone, stress, or a pathogen such as nematodes. Chemically inducible promoters are especially suitable if gene expression is wanted to occur in a time specific manner. Examples of such promoters are a salicylic acid inducible promoter (WO 95/19443), a tetracycline inducible promoter (Gatz et al., 1992 Plant J. 2:397-404), the light-inducible promoter from the small subunit of Ribulose-1,5-bis-phosphate carboxylase (ssRUBISCO), and an ethanol inducible promoter (WO 93/21334). Also, suitable promoters responding to biotic or abiotic stress conditions are those such as the pathogen inducible PRP1-gene promoter (Ward et al., 1993 Plant. Mol. Biol. 22:361-366), the heat inducible hsp80-promoter from tomato (U.S. Pat. No. 5,187,267), cold inducible alpha-amylase promoter from potato (WO 96/12814), the drought-inducible promoter of maize (Busk et. al., Plant J. 11:1285-1295, 1997), the cold, drought, and high salt inducible promoter from potato (Kirch, Plant Mol. Biol. 33:897-909, 1997) or the RD29A promoter from Arabidopsis (Yamaguchi-Shinozalei et. al., Mol. Gen. Genet. 236:331-340, 1993), many cold inducible promoters such as corl5a promoter from Arabidopsis (Genbank Accession No U01377), blt101 and blt4.8 from barley (Genbank Accession Nos AJ310994 and U63993), wcs120 from wheat (Genbank Accession No AF031235), mlip15 from corn (Genbank Accession No D26563), bn115 from Brassica (Genbank Accession No U01377), and the wound-inducible pinII-promoter (European Patent No. 375091). Of particular interest in the present invention are syncytia site preferred, or nematode feeding site induced, promoters, including, but not limited to promoters from the Mtn3-like promoter disclosed in PCT/EP2008/051328, the Mtn21-like promoter disclosed in PCT/EP2007/051378, the peroxidase-like promoter disclosed in PCT/EP2007/064356, the trehalose-6-phosphate phosphatase-like promoter disclosed in PCT/EP2007/063761 and the At5g12170-like promoter disclosed in PCT/EP2008/051329, all of the forgoing applications are herein incorporated by reference.

[0074] Yet another embodiment of the invention relates to a method of producing a transgenic plant comprising a polynucleotide, wherein the method comprises the steps of: 1) introducing into the plant the expression vector comprising a polynucleotide described above, wherein expression of the polynucleotide confers increased pathogen resistance to the plant; and 2) selecting transgenic plants for increased pathogen resistance.

[0075] A variety of methods for introducing polynucleotides into the genome of plants and for the regeneration of plants from plant tissues or plant cells are known in, for example, Plant Molecular Biology and Biotechnology (CRC Press, Boca Raton, Fla.), chapter 6/7, pp. 71-119 (1993); White FF (1993) Vectors for Gene Transfer in Higher Plants; Transgenic Plants, vol. 1, Engineering and Utilization, Ed.: Kung and Wu R, Academic Press, 15-38; Jenes B et al. (1993) Techniques for Gene Transfer; Transgenic Plants, vol. 1, Engineering and Utilization, Ed.: Kung and R. Wu, Academic Press, pp. 128-143; Potrykus (1991) Annu Rev Plant Physiol Plant Molec Biol 42:205-225; Halford N G, Shewry P R (2000) Br Med Bull 56(1):62-73.

Transformation methods may include direct and indirect methods of transformation. Suitable direct methods include polyethylene glycol induced DNA uptake, liposome-mediated transformation (U.S. Pat. No. 4,536,475), biolistic methods using the gene gun (Fromm M E et al., Bio/Technology. 8(9):833-9, 1990; Gordon-Kamm et al. Plant Cell 2:603, 1990), electroporation, incubation of dry embryos in DNA-comprising solution, and microinjection. In the case of these direct transformation methods, the plasmids used need not meet any particular requirements. Simple plasmids, such as those of the pUC series, pBR322, M13mp series, pACYC184 and the like can be used. If intact plants are to be regenerated from the transformed cells, an additional selectable marker gene is preferably located on the plasmid. The direct transformation techniques are equally suitable for dicotyledonous and monocotyledonous plants.
Transformation can also be carried out by bacterial infection by means of Agrobacterium (for example EP 0 116 718), viral infection by means of viral vectors (EP 0 067 553; U.S. Pat. No. 4,407,956; WO 95/34668; WO 93/03161) or by means of pollen (EP 0 270 356; WO 85/01856; U.S. Pat. No. 4,684,611). Agrobacterium based transformation techniques (especially for dicotyledonous plants) are well known in the art. The Agrobacterium strain (e.g., Agrobacterium tumefaciens or Agrobacterium rhizogenes) comprises a plasmid (Ti or Ri plasmid) and a T-DNA element which is transferred to the plant following infection with Agrobacterium. The T-DNA (transferred DNA) is integrated into the genome of the plant cell. The T-DNA may be localized on the Ri- or Ti-plasmid or is separately comprised in a so-called binary vector. Methods for the Agrobacterium-mediated transformation are described, for example, in Horsch R B et al. (1985) Science 225:1229. The Agrobacterium-mediated transformation is best suited to dicotyledonous plants but has also been adapted to monocotyledonous plants. The transformation of plants by Agrobacteria is described in, for example, White F F, Vectors for Gene Transfer in Higher Plants, Transgenic Plants, Vol. 1, Engineering and Utilization, edited by S.D. Kung and R. Wu, Academic Press, 1993, pp. 15-38; Jenes B et al. Techniques for Gene Transfer, Transgenic Plants, Vol. 1, Engineering and Utilization, edited by S. D. Kung and R. Wu, Academic Press, 1993, pp. 128-143; Potrykus (1991) Annu Rev Plant Physiol Plant Molec Biol 42:205-225.
Transformation may result in transient or stable transformation and expression. Although a nucleotide sequence of the present invention can be inserted into any plant and plant cell falling within these broad classes, it is particularly useful in crop plant cells.
Various tissues are suitable as starting material (explant) for the Agrobacterium-mediated transformation process including but not limited to callus (U.S. Pat. No. 5,591,616; EP-A1604 662), immature embryos (EP-A1672 752), pollen (U.S. Pat. No. 5,929,300), shoot apex (U.S. Pat. No. 5,164,310), or in planta transformation (U.S. Pat. No. 5,994,624). The method and material described herein can be combined with virtually all Agrobacterium mediated transformation methods known in the art. Preferred combinations include, but are not limited to, the following starting materials and methods:

[0076] In one embodiment he nucleotides of the present invention can be directly transformed into the plastid genome. Plastid expression, in which genes are inserted by homologous recombination into the several thousand copies of the circular plastid genome present in each plant cell, takes advantage of the enormous copy number advantage over nuclear-expressed genes to permit high expression levels. In one embodiment, the nucleotides are inserted into a plastid targeting vector and transformed into the plastid genome of a desired plant host. Plants homoplasmic for plastid genomes containing the nucleotide sequences are obtained, and are preferentially capable of high expression of the nucleotides.

Plastid transformation technology is for example extensively described in U.S. Pat. NOs. 5,451,513, 5,545,817, 5,545,818, and 5,877,462 in WO 95/16783 and WO 97/32977, and in McBride et al. (1994) Proc. Natl. Acad. Sci. USA 91, 7301-7305, all incorporated herein by reference in their entirety. The basic technique for plastid transformation involves introducing regions of cloned plastid DNA flanking a selectable marker together with the nucleotide sequence into a suitable target tissue, e.g., using biolistic or protoplast transformation (e.g., calcium chloride or PEG mediated transformation). The 1 to 1.5 kb flanking regions, termed targeting sequences, facilitate homologous recombination with the plastid genome and thus allow the replacement or modification of specific regions of the plastome. Initially, point mutations in the chloroplast 16S rRNA and rps12 genes conferring resistance to spectinomycin and/or streptomycin are utilized as selectable markers for transformation (Svab et al., PNAS 87, 8526-8530, 1990; Staub et al., Plant Cell 4, 39-45, 1992). The presence of cloning sites between these markers allows creation of a plastid targeting vector for introduction of foreign genes (Staub et al. EMBO J. 12, 601-606, 1993). Substantial increases in transformation frequency are obtained by replacement of the recessive rRNA or r-protein antibiotic resistance genes with a dominant selectable marker, the bacterial aadA gene encoding the spectinomycin-detoxifying enzyme aminoglycoside-3′-adenyltransferase (Svab et al., PNAS 90, 913-917, 1993). Other selectable markers useful for plastid transformation are known in the art and encompassed within the scope of the invention.

[0077] The transgenic plants of the invention may be used in a method of controlling infestation of a crop by a plant pathogen, which comprises the step of growing said crop from seeds comprising an expression construct comprising one or more transcription regulatory elements operably linked to one or more polynucleotides that encode an agent to said plant pathogen, wherein the expression vector is stably integrated into the genomes of the seeds.

[0078] Comprises/comprising and grammatical variations thereof when used in this specification are to be taken to specify the presence of stated features, integers, steps or components or groups thereof, but not to preclude the presence or addition of one or more other features, integers, steps, components or groups thereof.

[0079] In accordance with the invention, the term “plant cell” or the term “organism” as understood herein relates always to a plant cell or a organelle thereof, preferably a plastid, more preferably chloroplast.

As used herein, “plant” is meant to include not only a whole plant but also a part thereof i.e., one or more cells, and tissues, including for example, leaves, stems, shoots, roots, flowers, fruits and seeds.

[0080] Surprisingly it was found, that the transgenic expression of the Saccaromyces cerevisiae protein as shown in table II, column 3 and/or the transgenic expression of the E. coli protein as shown in table II, column 3 in a plant such as Arabidopsis thaliana for example, conferred to the transgenic a plant cell, a plant or a part thereof increased resistance to plant disease, preferably pathogenic fungi and/or nematodes as compared to a corresponding non-transformed wild type control plant cell, a plant or a part thereof

[0081] Accordingly, in one embodiment, in case the activity of the Escherichia coli polypeptide with SEQ ID NO.: 10 or a polypeptide comprising the SEQ ID NO.: 10 or a polypeptide encoded the nucleic acid molecule of SEQ ID NO: 9 or comprising SEQ ID NO: 9, respectively is increased or generated, e.g. if the activity of a polypeptide comprising the polypeptide or the consensus sequence or the polypeptide motif, as depicted in Table I, II or IV, column 7 in the respective same line as the nucleic acid molecule SEQ ID NO.: 9 or polypeptide SEQ ID NO.: 10, respectively is increased or generated or if the activity “GTPase” or “non-essential small GTPase” is increased or generated in an plant cell, plant or part thereof an increased resistance to plant disease, preferably pathogenic fungi and/or nematodes as compared to a corresponding non-transformed wild type control, plant cell, a plant or a part thereof is conferred.

Accordingly, in one embodiment, in case the activity of the Saccharomyces cerevisiae polypeptide with SEQ ID NO.: 51 or a polypeptide comprising the SEQ ID NO.: 51 or a polypeptide encoded the nucleic acid molecule of SEQ ID NO: 50 or comprising SEQ ID NO: 50, respectively is increased or generated, e.g. if the activity of a polypeptide comprising the polypeptide or the consensus sequence or the polypeptide motif, as depicted in Table I, II or IV, column 7 in the respective same line as the nucleic acid molecule SEQ ID NO.: 50 or polypeptide SEQ ID NO.: 51, respectively is increased or generated or if the activity “transcriptional repressor with DNA-binding Winged helix domain 35 (GntR family)”, “DNA-binding transcriptional dual regulator protein” or “transcription regulator gabP 3′ region” is increased or generated in an plant cell, plant or part thereof an increased resistance to plant disease, preferably pathogenic fungi and/or nematodes as compared to a corresponding non-transformed wild type control, plant cell, a plant or a part thereof is conferred.

[0082] For the purposes of the invention, as a rule the plural is intended to encompass the singular and vice versa.

Unless otherwise specified, the terms “polynucleotides”, “nucleic acid” and “nucleic acid molecule” are interchangeably in the present context. Unless otherwise specified, the terms “peptide”, “polypeptide” and “protein” are interchangeably in the present context. The term “sequence” may relate to polynucleotides, nucleic acids, nucleic acid molecules, peptides, polypeptides and proteins, depending on the context in which the term “sequence” is used. The terms “gene(s)”, “polynucleotide”, “nucleic acid sequence”, “nucleotide sequence”, or “nucleic acid molecule(s)” as used herein refers to a polymeric form of nucleotides of any length, either ribonucleotides or deoxyribonucleotides. The terms refer only to the primary structure of the molecule.
Thus, the terms “gene(s)”, “polynucleotide”, “nucleic acid sequence”, “nucleotide sequence”, or “nucleic acid molecule(s)” as used herein include double- and single-stranded DNA and/or RNA. They also include known types of modifications, for example, methylation, “caps”, substitutions of one or more of the naturally occurring nucleotides with an analog. Preferably, the DNA or RNA sequence comprises a coding sequence encoding the herein defined polypeptide.
A “coding sequence” is a nucleotide sequence, which is transcribed into an RNA, e.g. a regulatory RNA, such as a miRNA, a ta-siRNA, cosuppression molecule, an RNAi, a ribozyme, etc. or into a mRNA which is translated into a polypeptide when placed under the control of appropriate regulatory sequences. The boundaries of the coding sequence are determined by a translation start codon at the 5′-terminus and a translation stop codon at the 3′-terminus. A coding sequence can include, but is not limited to mRNA, cDNA, recombinant nucleotide sequences or genomic DNA, while introns may be present as well under certain circumstances.
As used in the present context a nucleic acid molecule may also encompass the untranslated sequence located at the 3′ and at the 5′ end of the coding gene region, for example at least 500, preferably 200, especially preferably 100, nucleotides of the sequence upstream of the 5′ end of the coding region and at least 100, preferably 50, especially preferably 20, nucleotides of the sequence downstream of the 3′ end of the coding gene region. In the event for example the antisense, RNAi, snRNA, dsRNA, siRNA, miRNA, ta-siRNA, cosuppression molecule, ribozyme etc. technology is used coding regions as well as the 5′- and/or 3′-regions can advantageously be used.
However, it is often advantageous only to choose the coding region for cloning and expression purposes.
“Polypeptide” refers to a polymer of amino acid (amino acid sequence) and does not refer to a specific length of the molecule. Thus, peptides and oligopeptides are included within the definition of polypeptide. This term does also refer to or include post-translational modifications of the polypeptide, for example, glycosylations, acetylations, phosphorylations and the like. Included within the definition are, for example, polypeptides containing one or more analogs of an amino acid (including, for example, unnatural amino acids, etc.), polypeptides with substituted linkages, as well as other modifications known in the art, both naturally occurring and non-naturally occurring.
The term “Table I” used in this specification is to be taken to specify the content of Table I A and Table I B. The term “Table II” used in this specification is to be taken to specify the content of Table II A and Table II B. The term “Table I A” used in this specification is to be taken to specify the content of Table I A. The term “Table I B” used in this specification is to be taken to specify the content of Table I B. The term “Table II A” used in this specification is to be taken to specify the content of Table II A. The term “Table II B” used in this specification is to be taken to specify the content of Table II B. In one preferred embodiment, the term “Table I” means Table I B. In one preferred embodiment, the term “Table II” means Table II B.
The terms “comprise” or “comprising” and grammatical variations thereof when used in this specification are to be taken to specify the presence of stated features, integers, steps or components or groups thereof, but not to preclude the presence or addition of one or more other features, integers, steps, components or groups thereof.

[0083] In accordance with the invention, a protein or polypeptide has the “activity of an protein as shown in table II, column 3” if its de novo activity, or its increased expression directly or indirectly leads to and confers an increased resistance to plant disease, preferably pathogenic fungi and/or nematodes as compared to a corresponding non-transformed wild type control plant cell, plant or part thereof and the protein has the above mentioned activities of a protein as shown in table II, column 3. Throughout the specification the activity or preferably the biological activity of such a protein or polypeptide or an nucleic acid molecule or sequence encoding such protein or polypeptide is identical or similar if it still has the biological or enzymatic activity of a protein as shown in table II, column 3, or which has at least 10% of the original biological or enzymatic activity, preferably 20%, particularly preferably 30%, most particularly preferably 40% in comparison to a protein as shown in table II, column 3 of E. coli or Saccharomyces cerevisiae.

[0084] The terms “increased”, “rised”, “extended”, “enhanced”, “improved” or “amplified” relate to a corresponding change of a property in a plant, an organism, a part of an organism such as a tissue, seed, root, leave, flower etc. or in a cell and are interchangeable. Preferably, the overall activity in the volume is increased or enhanced in cases if the increase or enhancement is related to the increase or enhancement of an activity of a gene product, independent whether the amount of gene product or the specific activity of the gene product or both is increased or enhanced or whether the amount, stability or translation efficacy of the nucleic acid sequence or gene encoding for the gene product is increased or enhanced.

[0085] The terms “increase” relate to a corresponding change of a property an organism or in a part of a plant, an organism, such as a tissue, seed, root, leave, flower etc. or in a cell. Preferably, the overall activity in the volume is increased in cases the increase relates to the increase of an activity of a gene product, independent whether the amount of gene product or the specific activity of the gene product or both is increased or generated or whether the amount, stability or translation efficacy of the nucleic acid sequence or gene encoding for the gene product is increased.

Under “change of a property” it is understood that the activity, expression level or amount of a gene product or the metabolite content is changed in a specific volume relative to a corresponding volume of a control, reference or wild type, including the de novo creation of the activity or expression.
The terms “increase” include the change of said property in only parts of the subject of the present invention, for example, the modification can be found in compartment of a cell, like a organelle, or in a part of a plant, like tissue, seed, root, leave, flower etc. but is not detectable if the overall subject, i.e. complete cell or plant, is tested.
Accordingly, the term “increase” means that the specific activity of an enzyme as well as the amount of a compound or metabolite, e.g. of a polypeptide, a nucleic acid molecule of the invention or an encoding mRNA or DNA, can be increased in a volume.

[0086] The terms “wild type”, “control” or “reference” are exchangeable and can be a cell or a part of organisms such as an organelle like a chloroplast or a tissue, or an organism, in particular a plant, which was not modified or treated according to the herein described process according to the invention. Accordingly, the cell or a part of organisms such as an organelle like a chloroplast or a tissue, or an organism, in particular a plant used as wild type, control or reference corresponds to the cell, organism, plant or part thereof as much as possible and is in any other property but in the result of the process of the invention as identical to the subject matter of the invention as possible. Thus, the wild type, control or reference is treated identically or as identical as possible, saying that only conditions or properties might be different which do not influence the quality of the tested property.

Preferably, any comparison is carried out under analogous conditions. The term “analogous conditions” means that all conditions such as, for example, culture or growing conditions, water content of the soil, temperature, humidity or surrounding air or soil, assay conditions (such as buffer composition, temperature, substrates, pathogen strain, concentrations and the like) are kept identical between the experiments to be compared.
The “reference”, “control”, or “wild type” is preferably a subject, e.g. an organelle, a cell, a tissue, an organism, in particular a plant, which was not modified or treated according to the herein described process of the invention and is in any other property as similar to the subject matter of the invention as possible. The reference, control or wild type is in its genome, transcriptome, proteome or metabolome as similar as possible to the subject of the present invention. Preferably, the term “reference-” “control-” or “wild type-”-organelle, -cell, -tissue or -organism, in particular plant, relates to an organelle, cell, tissue or organism, in particular plant, which is nearly genetically identical to the organelle, cell, tissue or organism, in particular plant, of the present invention or a part thereof preferably 95%, more preferred are 98%, even more preferred are 99.00%, in particular 99.10%, 99.30%, 99.50%, 99.70%, 99.90%, 99.99%, 99.999% or more. Most preferable the “reference”, “control”, or “wild type” is a subject, e.g. an organelle, a cell, a tissue, an organism, which is genetically identical to the organism, cell or organelle used according to the process of the invention except that the responsible or activity conferring nucleic acid molecules or the gene product encoded by them are amended, manipulated, exchanged or introduced according to the inventive process.

[0087] In case, a control, reference or wild type differing from the subject of the present invention only by not being subject of the process of the invention can not be provided, a control, reference or wild type can be an organism in which the cause for the modulation of an activity conferring the increased resistance to plant disease, preferably pathogenic fungi and/or nematodes as compared to a corresponding non-transformed wild type control plant cell, plant or part thereof or expression of the nucleic acid molecule of the invention as described herein has been switched back or off, e.g. by knocking out the expression of responsible gene product, e.g. by antisense inhibition, by inactivation of an activator or agonist, by activation of an inhibitor or antagonist, by inhibition through adding inhibitory antibodies, by adding active compounds as e.g. hormones, by introducing negative dominant mutants, etc. A gene production can for example be knocked out by introducing inactivating point mutations, which lead to an enzymatic activity inhibition or a destabilization or an inhibition of the ability to bind to cofactors etc.

[0088] Accordingly, preferred reference subject is the starting subject of the present process of the invention. Preferably, the reference and the subject matter of the invention are compared after standardization and normalization, e.g. to the amount of total RNA, DNA, or Protein or activity or expression of reference genes, like housekeeping genes, such as ubiquitin, actin or ribosomal proteins.

[0089] The increase or modulation according to this invention can be constitutive, e.g. due to a stable permanent transgenic expression or to a stable mutation in the corresponding endogenous gene encoding the nucleic acid molecule of the invention or to a modulation of the expression or of the behavior of a gene conferring the expression of the polypeptide of the invention, or transient, e.g. due to an transient transformation or temporary addition of a modulator such as a agonist or antagonist or inducible, e.g. after transformation with a inducible construct carrying the nucleic acid molecule of the invention under control of a inducible promoter and adding the inducer, e.g. tetracycline or as described herein below.

[0090] The increase in activity of the polypeptide amounts in a cell, a tissue, a organelle, an organ or an organism or a part thereof preferably to at least 5%, preferably to at least 20% or at to least 50%, especially preferably to at least 70%, 80%, 90% or more, very especially preferably are to at least 200%, 300% or 400%, most preferably are to at least 500% or more in comparison to the control, reference or wild type.

In one embodiment the term increase means the increase in amount in relation to the weight of the organism or part thereof (w/w).
In one embodiment the increase in activity of the polypeptide amounts in an organelle such as a plastid.

[0091] The specific activity of a polypeptide encoded by a nucleic acid molecule of the present invention or of the polypeptide of the present invention can be tested as described in the examples. In particular, the expression of a protein in question in a cell, e.g. a plant cell in comparison to a control is an easy test and can be performed as described in the state of the art.

[0092] The term “increase” includes, that a compound or an activity is introduced into a cell or a subcellular compartment or organelle de novo or that the compound or the activity has not been detectable before, in other words it is “generated”.

Accordingly, in the following, the term “increasing” also comprises the term “generating” or “stimulating”. The increased activity manifests itself in an increase of the increased resistance to plant disease, preferably pathogenic fungi and/or nematodes as compared to a corresponding non-transformed wild type control plant cell, plant or part thereof.

[0093] The sequence of B2664 from Escherichia coli, e.g. as shown in column 5 of Table I, has been published in Blattner et al., Science 277 (5331), 1453-1474 (1997), and its activity is published described as GTPase or non-essential small GTPase.

Accordingly, in one embodiment, the process of the present invention comprises increasing or generating the activity of a gene product with the activity of a “GTPase or non-essential small GTPase” from Escherichia coli or its functional equivalent or its homolog, e.g. the increase of
[0094] (a) a gene product of a gene comprising the nucleic acid molecule as shown in column 5 of Table I and being depicted in the same respective line as said B2664 or a functional equivalent or a homologue thereof as depicted in column 7 of Table I, preferably a homologue or functional equivalent as shown depicted in column 7 of Table I B, and being depicted in the same respective line as said B2664; or
[0095] (b) a polypeptide comprising a polypeptide, a consensus sequence or a polypeptide motif as shown depicted in column 5 of Table II or in column 7 of Table IV respectively, and being depicted in the same respective line as said B2664 or a functional equivalent or a homologue thereof as depicted in column 7 of Table II, preferably a homologue or functional equivalent as depicted in column 7 of Table II B, and being depicted in the same respective line as said B2664,
   as mentioned herein, for the an increased resistance to plant disease, preferably pathogenic fungi and/or nematodes as compared to a corresponding non-transformed wild type control plant cell, plant or part thereof in plant cell, plant or part thereof, as mentioned.
   Accordingly, in one embodiment, the molecule which activity is to be increased in the process of the invention is the gene product with an activity of described as a “GTPase or non-essential small GTPase”, preferably it is the molecule of section (a) or (b) of this paragraph.
   The sequence of YNLO90W from Saccharomyces cerevisiae, e.g. as shown in column 5 of Table I, has been published in Goffeau et al., Science 274 (5287), 546-547, 1996, and its activity is described as “transcription regulator gabP 3′ region, transcriptional repressor with DNA-binding Winged helix domain 35 (GntR family) or DNA-binding transcriptional dual regulator protein”.
   Accordingly, in one embodiment, the process of the present invention comprises increasing or generating the activity of a gene product with the activity of a “transcription regulator gabP 3′ region, transcriptional repressor with DNA-binding Winged helix domain 35 (GntR family) or DNA-binding transcriptional dual regulator protein” from Saccharomyces cerevisiae or its functional equivalent or its homolog, e.g. the increase of
[0096] (a) a gene product of a gene comprising the nucleic acid molecule as shown in column 5 of Table I and being depicted in the same respective line as said YNLO90W or a functional equivalent or a homologue thereof as depicted in column 7 of Table I, preferably a homologue or functional equivalent as shown depicted in column 7 of Table I B, and being depicted in the same respective line as said YNL090W; or
[0097] (b) a polypeptide comprising a polypeptide, a consensus sequence or a polypeptide motif as shown depicted in column 5 of Table II or in column 7 of Table IV respectively, and being depicted in the same respective line as said YNLO90W or a functional equivalent or a homologue thereof as depicted in column 7 of Table II, preferably a homologue or functional equivalent as depicted in column 7 of Table II B, and being depicted in the same respective line as said YNL090W,
   as mentioned herein, for the an increased resistance to plant disease, preferably pathogenic fungi and/or nematodes as compared to a corresponding non-transformed wild type control plant cell, plant or part thereof in plant cell, plant or part thereof, as mentioned.
   Accordingly, in one embodiment, the molecule which activity is to be increased in the process of the invention is the gene product with an activity of described as a “transcription regulator gabP 3′ region, transcriptional repressor with DNA-binding Winged helix domain 35 (GntR family) or DNA-binding transcriptional dual regulator protein”, preferably it is the molecule of section (a) or (b) of this paragraph.

[0098] Surprisingly, it was observed that a increasing or generating the activity of at least one gene conferring an activity selected from the group consisting of: GTPase, non-essential small GTPase,

transcription regulator gabP 3′ region, transcriptional repressor with DNA-binding Winged helix domain 35 (GntR family) and DNA-binding transcriptional dual regulator protein or of a gene comprising a nucleic acid sequence described in column 5 of Table I in Arabidopsis thaliana, preferably ecotype C24 conferred an increased resistance to plant disease, preferably pathogenic fungi and/or nematodes as compared to a corresponding non-transformed wild type control plant.

[0099] It was observed that increasing or generating the activity of a gene product with the activity of a “GTPase or non-essential small GTPase” encoded by a gene comprising the nucleic acid sequence SEQ ID NO.: 9 in Arabidopsis thaliana, preferably ecotype C24 conferred an increased resistance to plant disease, preferably pathogenic fungi and/or nematodes as compared to a corresponding non-transformed wild type control.

It was observed that increasing or generating the activity of a gene product with the activity of a “transcription regulator gabP 3′ region, transcriptional repressor with DNA-binding Winged helix domain 35 (GntR family) or DNA-binding transcriptional dual regulator protein” encoded by a gene comprising the nucleic acid sequence SEQ ID NO.: 50 in Arabidopsis thaliana, preferably ecotype C24 conferred an increased resistance to plant disease, preferably pathogenic fungi and/or nematodes as compared to a corresponding non-transformed wild type control.

[0100] Thus, according to the method of the invention an increased resistance to plant disease, preferably pathogenic fungi and/or nematodes as compared to a corresponding non-transformed wild type control can be achieved. Accordingly, in one embodiment, in case the activity of a polypeptide according to the polypeptide SEQ ID NO.: 10, or encoded by a nucleic acid molecule comprising the nucleic acid SEQ ID NO.: 9 or a homolog of said nucleic acid molecule or polypeptide, e.g. if the activity of a nucleic acid molecule or a polypeptide comprising the nucleic acid or polypeptide or the consensus sequence or the polypeptide motif, as depicted in Table I, II or IV, column 7 in the respective same line as the nucleic acid molecule SEQ ID NO.: 9 or polypeptide SEQ ID NO.: 10, respectively is increased or generated or if the activity “GTPase ornon-essential small GTPase” is increased or generated in an organism, preferably

increased resistance to plant disease, preferably pathogenic fungi and/or nematodes as compared to a corresponding non-transformed wild type control is conferred in said organism.
Accordingly, in one embodiment, in case the activity of a polypeptide according to the polypeptide SEQ ID NO.: 51, or encoded by a nucleic acid molecule comprising the nucleic acid SEQ ID NO.: 50 or a homolog of said nucleic acid molecule or polypeptide, e.g. if the activity of a nucleic acid molecule or a polypeptide comprising the nucleic acid or polypeptide or the consensus sequence or the polypeptide motif, as depicted in Table I, II or IV, column 7 in the respective same line as the nucleic acid molecule SEQ ID NO.: 50 or polypeptide SEQ ID NO.: 51, respectively is increased or generated or if the activity “transcription regulator gabP 3′ region, transcriptional repressor with DNA-binding Winged helix domain 35 (GntR family) or DNA-binding transcriptional dual regulator protein” is increased or generated in an organism, preferably
increased resistance to plant disease, preferably pathogenic fungi and/or nematodes as compared to a corresponding non-transformed wild type control is conferred in said organism.
Preferably, an increased resistance to drought as compared to a corresponding non-transformed wild type control is additionally conferred in said organism.

[0101] The term “expression” refers to the transcription and/or translation of a codogenic gene segment or gene. As a rule, the resulting product is an mRNA or a protein. However, expression products can also include functional RNAs such as, for example, antisense, nucleic acids, tRNAs, snRNAs, rRNAs, RNAi, siRNA, ribozymes etc. Expression may be systemic, local or temporal, for example limited to certain cell types, tissues organs or organelles or time periods.

[0102] In one embodiment, the process of the present invention comprises one or more of the following steps
[0103] a) stabilizing a protein conferring the increased expression of a protein encoded by the nucleic acid molecule of the invention or of the polypeptide of the invention having the herein-mentioned activity selected from the group consisting of GTPase, non-essential small GTPase,
   transcription regulator gabP 3′ region, transcriptional repressor with DNA-binding Winged helix domain 35 (GntR family) and DNA-binding transcriptional dual regulator protein and confering an increased resistance to plant disease, preferably pathogenic fungi and/or nematodes as compared to a corresponding non-transformed wild type control plant cell, plant or part thereof;
[0104] b) stabilizing a mRNA conferring the increased expression of a protein encoded by the nucleic acid molecule of the invention or its homologs or of a mRNA encoding the polypeptide of the present invention having the herein-mentioned activity selected from the group consisting of GTPase, non-essential small GTPase, transcription regulator gabP 3′ region, transcriptional repressor with DNA-binding Winged helix domain 35 (GntR family) and DNA-binding transcriptional dual regulator protein and confering an increased resistance to plant disease, preferably pathogenic fungi and/or nematodes as compared to a corresponding non-transformed wild type control;
[0105] c) increasing the specific activity of a protein conferring the increased expression of a protein encoded by the nucleic acid molecule of the invention or of the polypeptide of the present invention or decreasing the inhibitory regulation of the polypeptide of the invention;
[0106] d) generating or increasing the expression of an endogenous or artificial transcription factor mediating the expression of a protein conferring the increased expression of a protein encoded by the nucleic acid molecule of the invention or of the polypeptide of the invention having the herein-mentioned activity selected from the group consisting of GTPase, non-essential small GTPase,
   transcription regulator gabP 3′ region, transcriptional repressor with DNA-binding Winged helix domain 35 (GntR family) and DNA-binding transcriptional dual regulator protein and conferring an increased resistance to plant disease, preferably pathogenic fungi and/or nematodes as compared to a corresponding non-transformed wild type control;
[0107] e) stimulating activity of a protein conferring the increased expression of a protein encoded by the nucleic acid molecule of the present invention or a polypeptide of the present invention having the herein-mentioned activity selected from the group consisting of GTPase, non-essential small GTPase,
   transcription regulator gabP 3′ region, transcriptional repressor with DNA-binding Winged helix domain 35 (GntR family) and DNA-binding transcriptional dual regulator protein and confering an increased resistance to plant disease, preferably pathogenic fungi and/or nematodes as compared to a corresponding non-transformed wild type control;
[0108] f) expressing a transgenic gene encoding a protein conferring the increased expression of a polypeptide encoded by the nucleic acid molecule of the present invention or a polypeptide of the present invention, having the herein-mentioned activity selected from the group consisting of GTPase, non-essential small GTPase,
   transcription regulator gabP 3′ region, transcriptional repressor with DNA-binding Winged helix domain 35 (GntR family) and DNA-binding transcriptional dual regulator protein and confering an increased resistance to plant disease, preferably pathogenic fungi and/or nematodes as compared to a corresponding non-transformed wild type control; and/or
[0109] g) increasing the copy number of a gene conferring the increased expression of a nucleic acid molecule encoding a polypeptide encoded by the nucleic acid molecule of the invention or the polypeptide of the invention having the herein-mentioned activity selected from the group consisting of GTPase, non-essential small GTPase,
   transcription regulator gabP 3′ region, transcriptional repressor with DNA-binding Winged helix domain 35 (GntR family) and DNA-binding transcriptional dual regulator protein and confering an increased resistance to plant disease, preferably pathogenic fungi and/or nematodes as compared to a corresponding non-transformed wild type control;
[0110] h) increasing the expression of the endogenous gene encoding the polypeptide of the invention or its homologs by adding positive expression or removing negative expression elements, e.g. homologous recombination can be used to either introduce positive regulatory elements like for plants the 35S enhancer into the promoter or to remove repressor elements form regulatory regions. Further gene conversion methods can be used to disrupt repressor elements or to enhance to activity of positive elements-positive elements can be randomly introduced in plants by T-DNA or transposon mutagenesis and lines can be identified in which the positive elements have been integrated near to a gene of the invention, the expression of which is thereby enhanced;
   and/or
[0111] i) modulating growth conditions of the plant in such a manner, that the expression or activity of the gene encoding the protein of the invention or the protein itself is enhanced;
[0112] j) selecting of organisms with especially high activity of the proteins of the invention from natural or from mutagenized resources and breeding them into the target organisms, e.g. the elite crops.

[0113] Preferably, said mRNA is the nucleic acid molecule of the present invention and/or the protein conferring the increased expression of a protein encoded by the nucleic acid molecule of the present invention alone or linked to a transit nucleic acid sequence or transit peptide encoding nucleic acid sequence or the polypeptide having the herein mentioned activity, e.g. conferring an increased resistance to plant disease, preferably pathogenic fungi and/or nematodes as compared to a corresponding non-transformed wild type control plant cell, plant or part thereof after increasing the expression or activity of the encoded polypeptide or having the activity of a polypeptide having an activity as the protein as shown in table II column 3 or its homologs.

[0114] In general, the amount of mRNA or polypeptide in a cell or a compartment of an organism correlates with the amount of encoded protein and thus with the overall activity of the encoded protein in said volume. Said correlation is not always linear, the activity in the volume is dependent on the stability of the molecules or the presence of activating or inhibiting co-factors. Further, product and educt inhibitions of enzymes are well known and described in textbooks, e.g. Stryer, Biochemistry.

[0115] In general, the amount of mRNA, polynucleotide or nucleic acid molecule in a cell or a compartment of an organism correlates with the amount of encoded protein and thus with the overall activity of the encoded protein in said volume. Said correlation is not always linear, the activity in the volume is dependent on the stability of the molecules, the degradation of the molecules or the presence of activating or inhibiting co-factors. Further, product and educt inhibitions of enzymes are well known, e.g. Zinser et al. “Enzyminhibitoren”/Enzyme inhibitors”.

[0116] The activity of the abovementioned proteins and/or polypeptides encoded by the nucleic acid molecule of the present invention can be increased in various ways. For example, the activity in an organism or in a part thereof, like a cell, is increased via increasing the gene product number, e.g. by increasing the expression rate, like introducing a stronger promoter, or by increasing the stability of the mRNA expressed, thus increasing the translation rate, and/or increasing the stability of the gene product, thus reducing the proteins decayed. Further, the activity or turnover of enzymes can be influenced in such a way that a reduction or increase of the reaction rate or a modification (reduction or increase) of the affinity to the substrate results, is reached. A mutation in the catalytic center of an polypeptide of the invention, e.g. as enzyme, can modulate the turn over rate of the enzyme, e.g. a knock out of an essential amino acid can lead to a reduced or completely knock out activity of the enzyme, or the deletion or mutation of regulator binding sites can reduce a negative regulation like a feedback inhibition (or a substrate inhibition, if the substrate level is also increased). The specific activity of an enzyme of the present invention can be increased such that the turn over rate is increased or the binding of a co-factor is improved. Improving the stability of the encoding mRNA or the protein can also increase the activity of a gene product. The stimulation of the activity is also under the scope of the term “increased activity”.

[0117] Moreover, the regulation of the abovementioned nucleic acid sequences may be modified so that gene expression is increased. This can be achieved advantageously by means of heterologous regulatory sequences or by modifying, for example mutating, the natural regulatory sequences which are present. The advantageous methods may also be combined with each other.

[0118] In general, an activity of a gene product in an organism or part thereof, in particular in a plant cell or organelle of a plant cell, a plant, or a plant tissue or a part thereof or in a microorganism can be increased by increasing the amount of the specific encoding mRNA or the corresponding protein in said organism or part thereof. “Amount of protein or mRNA” is understood as meaning the molecule number of polypeptides or mRNA molecules in an organism, a tissue, a cell or a cell compartment. “Increase” in the amount of a protein means the quantitative increase of the molecule number of said protein in an organism, a tissue, a cell or a cell compartment such as an organelle like a plastid or mitochondria or part thereof—for example by one of the methods described herein below—in comparison to a wild type, control or reference.

[0119] The increase in molecule number amounts preferably to at least 1%, preferably to more than 10%, more preferably to 30% or more, especially preferably to 50%, 70% or more, very especially preferably to 100%, most preferably to 500% or more. However, a de novo expression is also regarded as subject of the present invention.

[0120] A modification, i.e. an increase, can be caused by endogenous or exogenous factors. For example, an increase in activity in an organism or a part thereof can be caused by adding a gene product or a precursor or an activator or an agonist to the media or nutrition or can be caused by introducing said subjects into a organism, transient or stable. Furthermore such an increase can be reached by the introduction of the inventive nucleic acid sequence or the encoded protein in the correct cell compartment for example into the, nucleus, or cytoplasm respectively or into plastids either by transformation and/or targeting.

[0121] In one embodiment the increase or decrease in tolerance and/or resistance to environmental stress as compared to a corresponding non-transformed wild type plant cell in the plant or a part thereof, e.g. in a cell, a tissue, a organ, an organelle etc., is achieved by increasing the endogenous level of the polypeptide of the invention. Accordingly, in an embodiment of the present invention, the present invention relates to a process wherein the gene copy number of a gene encoding the polynucleotide or nucleic acid molecule of the invention is increased. Further, the endogenous level of the polypeptide of the invention can for example be increased by modifying the transcriptional or translational regulation of the polypeptide.

[0122] In one embodiment the increased tolerance and/or resistance to environmental stress in the plant or part thereof can be altered by targeted or random mutagenesis of the endogenous genes of the invention. For example homologous recombination can be used to either introduce positive regulatory elements like for plants the 35S enhancer into the promoter or to remove repressor elements form regulatory regions. In addition gene conversion like methods described by Kochevenko and Willmitzer (Plant Physiol. 2003 May; 132(1):174-84) and citations therein can be used to disrupt repressor elements or to enhance to activity of positive regulatory elements.

Furthermore positive elements can be randomly introduced in (plant) genomes by T-DNA or transposon mutagenesis and lines can be screened for, in which the positive elements has be integrated near to a gene of the invention, the expression of which is thereby enhanced. The activation of plant genes by random integrations of enhancer elements has been described by Hayashi et al., 1992 (Science 258:1350-1353) or Weigel et al., 2000 (Plant Physiol. 122, 1003-1013) and others citated therein. Reverse genetic strategies to identify insertions (which eventually carrying the activation elements) near in genes of interest have been described for various cases e.g. Krysan et al., 1999 (Plant Cell 1999, 11, 2283-2290); Sessions et al., 2002 (Plant Cell 2002, 14, 2985-2994); Young et al., 2001, (Plant Physiol. 2001, 125, 513-518); Koprek et al., 2000 (Plant J. 2000, 24, 253-263); Jeon et al., 2000 (Plant J. 2000, 22, 561-570); Tissier et al., 1999 (Plant Cell 1999, 11, 1841-1852); Speulmann et al., 1999 (Plant Cell 1999 ,11 , 1853-1866). Briefly material from all plants of a large T-DNA or transposon mutagenized plant population is harvested and genomic DNA prepared. Then the genomic DNA is pooled following specific architectures as described for example in Krysan et al., 1999 (Plant Cell 1999, 11, 2283-2290). Pools of genomics DNAs are then screened by specific multiplex PCR reactions detecting the combination of the insertional mutagen (eg T-DNA or Transposon) and the gene of interest. Therefore PCR reactions are run on the DNA pools with specific combinations of T-DNA or transposon border primers and gene specific primers. General rules for primer design can again be taken from Krysan et al., 1999 (Plant Cell 1999, 11, 2283-2290) Rescreening of lower levels DNA pools lead to the identifcation of individual plants in which the gene of interest is activated by the insertional mutagen.
The enhancement of positive regulatory elements or the disruption or weaking of negative regulatory elements can also be achieved through common mutagenesis techniques: The production of chemically or radiation mutated populations is a common technique and known to the skilled worker. Methods for plants are described by Koorneef et al. 1982 and the citations therein and by Lightner and Caspar in “Methods in Molecular Biology” Vol 82. These techniques usually induce pointmutations that can be identified in any known gene using methods such as TILLING (Colbert et al. 2001).

[0123] Accordingly, the expression level can be increased if the endogenous genes encoding a polypeptide conferring an increased expression of the polypeptide of the present invention, in particular genes comprising the nucleic acid molecule of the present invention, are modified via homologous recombination, Tilling approaches or gene conversion. It also possible to add as mentioned herein targeting sequences to the inventive nucleic acid sequences.

[0124] Regulatory sequences preferably in addition to a target sequence or part thereof can be operatively linked to the coding region of an endogenous protein and control its transcription and translation or the stability or decay of the encoding mRNA or the expressed protein. In order to modify and control the expression, promoter, UTRs, splicing sites, processing signals, polyadenylation sites, terminators, enhancers, repressors, post transcriptional or posttranslational modification sites can be changed, added or amended. For example, the activation of plant genes by random integrations of enhancer elements has been described by Hayashi et al., 1992 (Science 258:1350-1353) or Weigel et al., 2000 (Plant Physiol. 122, 1003-1013) and others citated therein. For example, the expression level of the endogenous protein can be modulated by replacing the endogenous promoter with a stronger transgenic promoter or by replacing the endogenous 3′UTR with a 3′UTR, which provides more stability without amending the coding region. Further, the transcriptional regulation can be modulated by introduction of an artificial transcription factor as described in the examples. Alternative promoters, terminators and UTR are described below.

[0125] The activation of an endogenous polypeptide having above-mentioned activity, e.g. having the activity of a protein as shown in table II, column 3 or of the polypeptide of the invention, e.g. conferring the increased resistance to plant disease, preferably pathogenic fungi and/or nematodes as compared to a corresponding non-transformed wild type control plant cell, plant or part thereof after increase of expression or activity in the cytosol and/or in an organelle like a plastid, can also be increased by introducing a synthetic transcription factor, which binds close to the coding region of the gene encoding the protein as shown in table II, column 3 and activates its transcription. A chimeric zinc finger protein can be constructed, which comprises a specific DNA-binding domain and an activation domain as e.g. the VP16 domain of Herpes Simplex virus. The specific binding domain can bind to the regulatory region of the gene encoding the protein as shown in table II, column 3. The expression of the chimeric transcription factor in a organism, in particular in a plant, leads to a specific expression of the protein as shown in table II, column 3, see e.g. in WO01/52620, Oriz, Proc. Natl. Acad. Sci. USA, 2002, Vol. 99, 13290 or Guan, Proc. Natl. Acad. Sci. USA, 2002, Vol. 99, 13296.

[0126] In one further embodiment of the process according to the invention, organisms are used in which one of the abovementioned genes, or one of the abovementioned nucleic acids, is mutated in a way that the activity of the encoded gene products is less influenced by cellular factors, or not at all, in comparison with the unmutated proteins. For example, well known regulation mechanism of enzymic activity are substrate inhibition or feed back regulation mechanisms. Ways and techniques for the introduction of substitution, deletions and additions of one or more bases, nucleotides or amino acids of a corresponding sequence are described herein below in the corresponding paragraphs and the references listed there, e.g. in Sambrook et al., Molecular Cloning, Cold Spring Habour, N.Y., 1989. The person skilled in the art will be able to identify regulation domains and binding sites of regulators by comparing the sequence of the nucleic acid molecule of the present invention or the expression product thereof with the state of the art by computer software means which comprise algorithms for the identifying of binding sites and regulation domains or by introducing into a nucleic acid molecule or in a protein systematically mutations and assaying for those mutations which will lead to an increased specific activity or an increased activity per volume, in particular per cell.

[0127] It can therefore be advantageous to express in an organism a nucleic acid molecule of the invention or a polypeptide of the invention derived from a evolutionary distantly related organism, as e.g. using a prokaryotic gene in a eukaryotic host, as in these cases the regulation mechanism of the host cell may not weaken the activity (cellular or specific) of the gene or its expression product.

[0128] The mutation is introduced in such a way that the increased yield under condition of transient and repetitive abiotic stress is not adversely affected.

[0129] Less influence on the regulation of a gene or its gene product is understood as meaning a reduced regulation of the enzymatic activity leading to an increased specific or cellular activity of the gene or its product. An increase of the enzymatic activity is understood as meaning an enzymatic activity, which is increased by at least 10%, advantageously at least 20, 30 or 40%, especially advantageously by at least 50, 60 or 70% in comparison with the starting organism. This leads to an increased resistance to plant disease, preferably pathogenic fungi and/or nematodes as compared to a corresponding non-transformed wild type control plant cell, plant or part thereof.

[0130] The invention provides that the above methods can be performed such that the stress tolerance is increased. It is also possible to obtain a decrease in stress tolerance.

[0131] The invention is not limited to specific nucleic acids, specific polypeptides, specific cell types, specific host cells, specific conditions or specific methods etc. as such, but may vary and numerous modifications and variations therein will be apparent to those skilled in the art. It is also to be understood that the terminology used herein is for the purpose of describing specific embodiments only and is not intended to be limiting.

[0132] The present invention also relates to isolated nucleic acids comprising a nucleic acid molecule selected from the group consisting of:
[0133] a) a nucleic acid molecule encoding the polypeptide shown in column 7 of Table II B;
[0134] b) a nucleic acid molecule shown in column 7 of Table I B;
[0135] c) a nucleic acid molecule, which, as a result of the degeneracy of the genetic code, can be derived from a polypeptide sequence depicted in column 5 or 7 of Table II and confers an increased resistance to plant disease, preferably pathogenic fungi and/or nematodes as compared to a corresponding non-transformed wild type control plant cell, a plant or a part thereof;
[0136] d) a nucleic acid molecule having at least 30% identity with the nucleic acid molecule sequence of a polynucleotide comprising the nucleic acid molecule shown in column 5 or 7 of Table I and confers an increased resistance to plant disease, preferably pathogenic fungi and/or nematodes as compared to a corresponding non-transformed wild type control plant cell, a plant or a part thereof;
[0137] e) a nucleic acid molecule encoding a polypeptide having at least 30% identity with the amino acid sequence of the polypeptide encoded by the nucleic acid molecule of (a) to (c) and having the activity represented by a nucleic acid molecule comprising a polynucleotide as depicted in column 5 of Table I and confers an increased resistance to plant disease, preferably pathogenic fungi and/or nematodes as compared to a corresponding non-transformed wild type control plant cell, a plant or a part thereof;
[0138] f) nucleic acid molecule which hybridizes with a nucleic acid molecule of (a) to (c) under stringent hybridization conditions and confers an increased resistance to plant disease, preferably pathogenic fungi and/or nematodes as compared to a corresponding non-transformed wild type control plant cell, a plant or a part thereof;
[0139] g) a nucleic acid molecule encoding a polypeptide which can be isolated with the aid of monoclonal or polyclonal antibodies made against a polypeptide encoded by one of the nucleic acid molecules of (a) to (e) and having the activity represented by the nucleic acid molecule comprising a polynucleotide as depicted in column 5 of Table I;
[0140] h) a nucleic acid molecule encoding a polypeptide comprising the consensus sequence or one or more polypeptide motifs as shown in column 7 of Table IV and preferably having the activity represented polypeptide comprising a polypeptide as depicted in column 5 of Table II or IV;
[0141] h) a nucleic acid molecule encoding a polypeptide having the activity represented by a protein as depicted in column 5 of Table II and confers an increased resistance to plant disease, preferably pathogenic fungi and/or nematodes as compared to a corresponding non-transformed wild type control plant cell, a plant or a part thereof;
[0142] i) nucleic acid molecule which comprises a polynucleotide, which is obtained by amplifying a cDNA library or a genomic library using the primers in column 7 of Table III and preferably having the activity represented by a polypeptide comprising a polypeptide as depicted in column 5 of Table II or IV;
[0143] and
[0144] j) a nucleic acid molecule which is obtainable by screening a suitable nucleic acid library under stringent hybridization conditions with a probe comprising a complementary sequence of a nucleic acid molecule of (a) or (b) or with a fragment thereof, having at least 15 nt, preferably 20 nt, 30 nt, 50 nt, 100 nt, 200 nt or 500 nt of a nucleic acid molecule complementary to a nucleic acid molecule sequence characterized in (a) to (e) and encoding a polypeptide having the activity represented by a protein comprising a polypeptide as depicted in column 5 of Table II;
   whereby the nucleic acid molecule according to (a) to (j) is at least in one or more nucleotides different from the sequence depicted in column 5 or 7 of Table I A and preferably which encodes a protein which differs at least in one or more amino acids from the protein sequences depicted in column 5 or 7 of Table II A.

[0145] In one embodiment, the homolog of the any one of the polypeptides indicated in Table II, column 3, is a homolog having the same or a similar acitivity. In particular an increase of activity confers an increased resistance to plant disease, preferably pathogenic fungi and/or nematodes as compared to a corresponding non-transformed wild type control.

In one embodiment, the homolog is a homolog with a sequence as indicated in Table I or II, column 7. In one embodiment, the homolog of one of the polypeptides indicated in Table II, column 3, is derived from an eukaryotic organism. In one embodiment, the homolog is derived from Fungi. In one embodiment, the homolog of a polypeptide indicated in Table II, column 3, is derived from Ascomyceta. In one embodiment, the homolog of a polypeptide indicated in Table II, column 3 is derived from Saccharomycotina. In one embodiment, the homolog of a polypeptide indicated in Table II, column 3, is derived from Saccharomycetes, preferably from Saccharomycetales, from Saccharomycetaceae, more preferably from Saccharomycetes.
In one embodiment, the homolog is a homolog with a sequnence as indicated in Table I or II, column 7. In one embodiment, the homolog of one of the polypeptides indicated in Table II, column 3, is derived from a bacteria. In one embodiment, the homolog of a polypeptide indicated in Table II, column 3, is derived from Proteobacteria. In one embodiment, the homolog of a polypeptide indicated in Table II, column 3, is a homolog having the same or a similar acitivity being derived from Gammaproteobacteria, preferably from Enterobacteriales, from Enterobacteriaceae, more preferably from Escherichia.
In one embodiment the invention relates to homologs of the aforementioned sequences, which can be isolated advantageously from yeast, fungi, viruses, algae, bacteria, such as Acetobacter (subgen. Acetobacter) aceti; Acidithiobacillus ferrooxidans; Acinetobacter sp.; Actinobacillus sp; Aeromonas salmonicida; Agrobacterium tumefaciens; Aquifex aeolicus; Arcanobacterium pyogenes; Aster yellows phytoplasma; Bacillus sp.; Bifidobacterium sp.; Borrelia burgdorferi; Brevibacterium linens; Brucella melitensis; Buchnera sp.; Butyrivibrio fibrisolvens; Campylobacter jejuni; Caulobacter crescentus; Chlamydia sp.; Chlamydophila sp.; Chlorobium limicola; Citrobacter rodentium; Clostridium sp.; Comamonas testosteroni; Corynebacterium sp.; Coxiella burnetii; Deinococcus radiodurans; Dichelobacter nodosus; Edwardsiella ictaluri; Enterobacter sp.; Erysipelothrix rhusiopathiae; Escherichia coli; Flavobacterium sp.; Francisella tularensis; Frankia sp. Cpl1; Fusobacterium nucleatum; Geobacillus stearothermophilus; Gluconobacter oxydans; Haemophilus sp.; Helicobacter pylori; Klebsiella pneumoniae; Lactobacillus sp.; Lactococcus lactis; Listeria sp.; Mannheimia haemolytica; Mesorhizobium loti; Methylophaga thalassica; Microcystis aeruginosa; Microscilla sp. PRE1; Moraxella sp. TA144; Mycobacterium sp.; Mycoplasma sp.; Neisseria sp.; Nitrosomonas sp.; Nostoc sp. PCC 7120; Novosphingobium aromaticivorans; Oenococcus oeni; Pantoea citrea; Pasteurella multocida; Pediococcus pentosaceus; Phormidium foveolarum; Phytoplasma sp.; Plectonema boryanum; Prevotella ruminicola; Propionibacterium sp.; Proteus vulgaris; Pseudomonas sp.; Ralstonia sp.; Rhizobium sp.; Rhodococcus equi; Rhodothermus marinus; Rickettsia sp.; Riemerella anatipestifer; Ruminococcus flavefaciens; Salmonella sp.; Selenomonas ruminantium; Serratia entomophila; Shigella sp.; Sinorhizobium meliloti; Staphylococcus sp.; Streptococcus sp.; Streptomyces sp.; Synechococcus sp.; Synechocystis sp. PCC 6803; Thermotoga maritima; Treponema sp.; Ureaplasma urealyticum; Vibrio cholerae; Vibrio parahaemolyticus; Xylella fastidiosa; Yersinia sp.; Zymomonas mobilis, preferably Salmonella sp. or Escherichia coli or plants, preferably from yeasts such as from the genera Saccharomyces, Pichia, Candida, Hansenula, Torulopsis or Schizosaccharomyces or plants such as Arabidopsis thaliana, maize, wheat, rye, oat, triticale, rice, barley, soybean, peanut, cotton, borage, sunflower, linseed, primrose, rapeseed, canola and turnip rape, manihot, pepper, sunflower, tagetes, solanaceous plant such as potato, tobacco, eggplant and tomato, Vicia species, pea, alfalfa, bushy plants such as coffee, cacao, tea, Salix species, trees such as oil palm, coconut, perennial grass, such as ryegrass and fescue, and forage crops, such as alfalfa and clover and from spruce, pine or fir for example. More preferably homologs of aforementioned sequences can be isolated from Saccharomyces cerevisiae, E. coli or plants, preferably Brassica napus, Glycine max, Zea mays, cotton, or Oryza sativa.

[0146] The (stress related) proteins of the present invention are preferably produced by recombinant DNA techniques. For example, a nucleic acid molecule encoding the protein is cloned into an expression vector, for example in to a binary vector, the expression vector is introduced into a host cell, for example the Arabidopsis thaliana wild type NASC N906 or any other plant cell as described in the examples see below, and the stress related protein is expressed in said host cell. Examples for binary vectors are pBIN19, pBI101, pBinAR, pGPTV, pCAMBIA, pBIB-HYG, pBecks, pGreen or pPZP (Hajukiewicz, P. et al., 1994, Plant Mol. Biol., 25: 989-994 and Hellens et al, Trends in Plant Science (2000) 5, 446-451.).

In one embodiment the (DROP) protein of the present invention is preferably produced in an compartment of the cell, more preferably in the plastids. Ways of introducing nucleic acids into plastids and producing proteins in this compartment are know to the person skilled in the art have been also described in this application.

[0147] Advantageously, the nucleic acid sequences according to the invention or the gene construct together with at least one reporter gene are cloned into an expression cassette, which is introduced into the organism via a vector or directly into the genome. This reporter gene should allow easy detection via a growth, fluorescence, chemical, bioluminescence or resistance assay or via a photometric measurement. Examples of reporter genes which may be mentioned are antibiotic- or herbicide-resistance genes, hydrolase genes, fluorescence protein genes, bioluminescence genes, sugar or nucleotide metabolic genes or biosynthesis genes such as the Ura3 gene, the Ilv2 gene, the luciferase gene, the β-galactosidase gene, the gfp gene, the 2-desoxyglucose-6-phosphate phosphatase gene, the β-glucuronidase gene, β-lactamase gene, the neomycin phosphotransferase gene, the hygromycin phosphotransferase gene, a mutated acetohydroxyacid synthase (AHAS) gene, also known as acetolactate synthase (ALS) gene], a gene for a D-amino acid metabolizing enzmye or the BASTA (=gluphosinate-resistance) gene. These genes permit easy measurement and quantification of the transcription activity and hence of the expression of the genes. In this way genome positions may be identified which exhibit differing productivity.

[0148] In a preferred embodiment a nucleic acid construct, for example an expression cassette, comprises upstream, i.e. at the 5′ end of the encoding sequence, a promoter and downstream, i.e. at the 3′ end, a polyadenylation signal and optionally other regulatory elements which are operably linked to the intervening encoding sequence with one of the nucleic acids of SEQ ID NO as depicted in table I, column 5 and 7. By an operable linkage is meant the sequential arrangement of promoter, encoding sequence, terminator and optionally other regulatory elements in such a way that each of the regulatory elements can fulfill its function in the expression of the encoding sequence in due manner. The sequences preferred for operable linkage are targeting sequences for ensuring subcellular localization in plastids. However, targeting sequences for ensuring subcellular localization in the mitochondrium, in the endoplasmic reticulum (=ER), in the nucleus, in oil corpuscles or other compartments may also be employed as well as translation promoters such as the 5′ lead sequence in tobacco mosaic virus (Gallie et al., Nucl. Acids Res. 15 (1987), 8693-8711).

[0149] A nucleic acid construct, for example an expression cassette may, for example, contain a constitutive promoter or a tissue-specific promoter (preferably the USP or napin promoter) the gene to be expressed and the ER retention signal. For the ER retention signal the KDEL amino acid sequence (lysine, aspartic acid, glutamic acid, leucine) or the KKX amino acid sequence (lysine-lysine-X-stop, wherein X means every other known amino acid) is preferably employed.

[0150] For expression in a host organism, for example a plant, the expression cassette is advantageously inserted into a vector such as by way of example a plasmid, a phage or other DNA which allows optimal expression of the genes in the host organism. Examples of suitable plasmids are: in E. coli pLG338, pACYC184, pBR series such as e.g. pBR322, pUC series such as pUC18 or pUC19, M113mp series, pKC30, pRep4, pHS1, pHS2, pPLc236, pMBL24, pLG200, pUR290, pIN-III¹¹³-B1, λgt11 or pBdCl; in Streptomyces pIJ101, pIJ364, pIJ702 or pIJ361; in Bacillus pUB110, pC194 or pBD214; in Corynebacterium pSA77 or pAJ667; in fungi pALS1, plL2 or pBB116; other advantageous fungal vectors are described by Romanos, M. A. et al., [(1992) “Foreign gene expression in yeast: a review”, Yeast 8: 423-488] and by van den Hondel, C. A. M. J. J. et al. [(1991) “Heterologous gene expression in filamentous fungi” as well as in More Gene Manipulations in Fungi [J. W. Bennet & L. L. Lasure, eds., pp. 396-428: Academic Press: San Diego] and in “Gene transfer systems and vector development for filamentous fungi” [van den Hondel, C. A. M. J. J. & Punt, P. J. (1991) in: Applied Molecular Genetics of Fungi, Peberdy, J. F. et al., eds., pp. 1-28, Cambridge University Press: Cambridge]. Examples of advantageous yeast promoters are 2 μM, pAG-1, YEp6, YEp13 or pEMBLYe23. Examples of algal or plant promoters are pLGV23, pGHlac⁺, pBIN19, pAK2004, pVKH or pDH51 (see Schmidt, R. and Willmitzer, L., 1988). The vectors identified above or derivatives of the vectors identified above are a small selection of the possible plasmids. Further plasmids are well known to those skilled in the art and may be found, for example, in the book Cloning Vectors (Eds. Pouwels P. H. et al. Elsevier, Amsterdam-New York-Oxford, 1985, ISBN 0 444 904018). Suitable plant vectors are described inter alia in “Methods in Plant Molecular Biology and Biotechnology” (CRC Press), Ch. 6/7, pp. 71-119. Advantageous vectors are known as shuttle vectors or binary vectors which replicate in E. coli and Agrobacterium.

[0151] By vectors is meant with the exception of plasmids all other vectors known to those skilled in the art such as by way of example phages, viruses such as SV40, CMV, baculovirus, adenovirus, transposons, IS elements, phasmids, phagemids, cosmids, linear or circular DNA. These vectors can be replicated autonomously in the host organism or be chromosomally replicated, chromosomal replication being preferred.

[0152] In a further embodiment of the vector the expression cassette according to the invention may also advantageously be introduced into the organisms in the form of a linear DNA and be integrated into the genome of the host organism by way of heterologous or homologous recombination. This linear DNA may be composed of a linearized plasmid or only of the expression cassette as vector or the nucleic acid sequences according to the invention.

[0153] In a further advantageous embodiment the nucleic acid sequence according to the invention can also be introduced into an organism on its own.

[0154] If in addition to the nucleic acid sequence according to the invention further genes are to be introduced into the organism, all together with a reporter gene in a single vector or each single gene with a reporter gene in a vector in each case can be introduced into the organism, whereby the different vectors can be introduced simultaneously or successively.

[0155] The vector advantageously contains at least one copy of the nucleic acid sequences according to the invention and/or the expression cassette (=gene construct) according to the invention.

[0156] The invention further provides an isolated recombinant expression vector comprising a nucleic acid encoding a polypeptide as depicted in table II, column 5 or 7, wherein expression of the vector in a host cell results in increased tolerance to environmental stress as compared to a wild type variety of the host cell. As used herein, the term “vector” refers to a nucleic acid molecule capable of transporting another nucleic acid to which it has been linked. One type of vector is a “plasmid,” which refers to a circular double stranded DNA loop into which additional DNA segments can be ligated. Another type of vector is a viral vector, wherein additional DNA segments can be ligated into the viral genome. Certain vectors are capable of autonomous replication in a host cell into which they are introduced (e.g., bacterial vectors having a bacterial origin of replication and episomal mammalian vectors). Other vectors (e.g., non-episomal mammalian vectors) are integrated into the genome of a host cell or a organelle upon introduction into the host cell, and thereby are replicated along with the host or organelle genome. Moreover, certain vectors are capable of directing the expression of genes to which they are operatively linked. Such vectors are referred to herein as “expression vectors.” In general, expression vectors of utility in recombinant DNA techniques are often in the form of plasmids. In the present specification, “plasmid” and “vector” can be used interchangeably as the plasmid is the most commonly used form of vector. However, the invention is intended to include such other forms of expression vectors, such as viral vectors (e.g., replication defective retroviruses, adenoviruses, and adeno-associated viruses), which serve equivalent functions.

[0157] The recombinant expression vectors of the invention comprise a nucleic acid of the invention in a form suitable for expression of the nucleic acid in a host cell, which means that the recombinant expression vectors include one or more regulatory sequences, selected on the basis of the host cells to be used for expression, which is operatively linked to the nucleic acid sequence to be expressed. As used herein with respect to a recombinant expression vector, “operatively linked” is intended to mean that the nucleotide sequence of interest is linked to the regulatory sequence(s) in a manner which allows for expression of the nucleotide sequence (e.g., in an in vitro transcription/translation system or in a host cell when the vector is introduced into the host cell). The term “regulatory sequence” is intended to include promoters, enhancers, and other expression control elements (e.g., polyadenylation signals). Such regulatory sequences are described, for example, in Goeddel, Gene Expression Technology Methods in Enzymology 185, Academic Press, San Diego, Calif. (1990) and Gruber and Crosby, in: Methods in Plant Molecular Biology and Biotechnology, eds. Glick and Thompson, Chapter 7, 89-108, CRC Press: Boca Raton, Fla., including the references therein. Regulatory sequences include those that direct constitutive expression of a nucleotide sequence in many types of host cells and those that direct expression of the nucleotide sequence only in certain host cells or under certain conditions. It will be appreciated by those skilled in the art that the design of the expression vector can depend on such factors as the choice of the host cell to be transformed, the level of expression of polypeptide desired, etc. The expression vectors of the invention can be introduced into host cells to thereby produce polypeptides or peptides, including fusion polypeptides or peptides, encoded by nucleic acids as described herein (e.g., DRCP, mutant forms of DRCP, fusion polypeptides, etc.).

[0158] The recombinant expression vectors of the invention can be designed for expression of the polypeptide of the invention in plant cells. For example, DRCP genes can be expressed in plant cells (See Schmidt, R. and Willmitzer, L., 1988, High efficiency Agrobacterium tumefaciens-mediated transformation of Arabidopsis thaliana leaf and cotyledon explants, Plant Cell Rep. 583-586; Plant Molecular Biology and Biotechnology, C Press, Boca Raton, Fla., chapter 6/7, S.71-119 (1993); F. F. White, B. Jenes et al., Techniques for Gene Transfer, in: Transgenic Plants, Vol. 1, Engineering and Utilization, eds. Kung and R. Wu, 128-43, Academic Press: 1993; Potrykus, 1991, Annu. Rev. Plant Physiol. Plant Molec. Biol. 42:205-225 and references cited therein). Suitable host cells are discussed further in Goeddel, Gene Expression Technology Methods in Enzymology 185, Academic Press: San Diego, Calif. (1990). Alternatively, the recombinant expression vector can be transcribed and translated in vitro, for example using T7 promoter regulatory sequences and T7 polymerase.

[0159] Expression of polypeptides in prokaryotes is most often carried out with vectors containing constitutive or inducible promoters directing the expression of either fusion or non-fusion polypeptides. Fusion vectors add a number of amino acids to a polypeptide encoded therein, usually to the amino terminus of the recombinant polypeptide but also to the C-terminus or fused within suitable regions in the polypeptides. Such fusion vectors typically serve three purposes: 1) to increase expression of a recombinant polypeptide; 2) to increase the solubility of a recombinant polypeptide; and 3) to aid in the purification of a recombinant polypeptide by acting as a ligand in affinity purification. Often, in fusion expression vectors, a proteolytic cleavage site is introduced at the junction of the fusion moiety and the recombinant polypeptide to enable separation of the recombinant polypeptide from the fusion moiety subsequent to purification of the fusion polypeptide. Such enzymes, and their cognate recognition sequences, include Factor Xa, thrombin, and enterokinase.

[0160] By way of example the plant expression cassette can be installed in the pRT transformation vector ((a) Toepfer et al., 1993, Methods Enzymol., 217: 66-78; (b) Toepfer et al. 1987, Nucl. Acids. Res. 15: 5890 ff.).

Alternatively, a recombinant vector (=expression vector) can also be transcribed and translated in vitro, e.g. by using the T7 promoter and the T7 RNA polymerase.

[0161] Expression vectors employed in prokaryotes frequently make use of inducible systems with and without fusion proteins or fusion oligopeptides, wherein these fusions can ensue in both N-terminal and C-terminal manner or in other useful domains of a protein. Such fusion vectors usually have the following purposes: i.) to increase the RNA expression rate; ii.) to increase the achievable protein synthesis rate; iii.) to increase the solubility of the protein; iv.) or to simplify purification by means of a binding sequence usable for affinity chromatography. Proteolytic cleavage points are also frequently introduced via fusion proteins, which allow cleavage of a portion of the fusion protein and purification. Such recognition sequences for proteases are recognized, e.g. factor Xa, thrombin and enterokinase.

[0162] Typical advantageous fusion and expression vectors are pGEX [Pharmacia Biotech Inc; Smith, D.B. and Johnson, K.S. (1988) Gene 67: 31-40], pMAL (New England Biolabs, Beverly, Mass.) and pRIT5 (Pharmacia, Piscataway, N.J.) which contains glutathione S-transferase (GST), maltose binding protein or protein A.

[0163] In one embodiment, the coding sequence of the polypeptide of the invention is cloned into a pGEX expression vector to create a vector encoding a fusion polypeptide comprising, from the N-terminus to the C-terminus, GST-thrombin cleavage site-X polypeptide. The fusion polypeptide can be purified by affinity chromatography using glutathione-agarose resin. Recombinant DRCP unfused to GST can be recovered by cleavage of the fusion polypeptide with thrombin.

Other examples of E. coli expression vectors are pTrc [Amann et al., (1988) Gene 69:301-315] and pET vectors [Studier et al., Gene Expression Technology: Methods in Enzymology 185, Academic Press, San Diego, Calif. (1990) 60-89; Stratagene, Amsterdam, The Netherlands].

[0164] Target gene expression from the pTrc vector relies on host RNA polymerase transcription from a hybrid trp-lac fusion promoter. Target gene expression from the pET 11d vector relies on transcription from a T7 gn10-lac fusion promoter mediated by a co-expressed viral RNA polymerase (T7 gn1). This viral polymerase is supplied by host strains BL21(DE3) or HMS174(DE3) from a resident I prophage harboring a T7 gn1 gene under the transcriptional control of the lacUV 5 promoter.

[0165] In a preferred embodiment of the present invention, the DROP are expressed in plants and plants cells such as unicellular plant cells (e.g. algae) (See Falciatore et al., 1999, Marine Biotechnology 1(3):239-251 and references therein) and plant cells from higher plants (e.g., the spermatophytes, such as crop plants). A nucleic acid molecule coding for DROP as depicted in table II, column 5 or 7 may be “introduced” into a plant cell by any means, including transfection, transformation or transduction, electroporation, particle bombardment, agroinfection, and the like. One transformation method known to those of skill in the art is the dipping of a flowering plant into an Agrobacteria solution, wherein the Agrobacteria contains the nucleic acid of the invention, followed by breeding of the transformed gametes.

[0166] Other suitable methods for transforming or transfecting host cells including plant cells can be found in Sambrook, et al., Molecular Cloning: A Laboratory Manual. 2^{nd}, ed., Cold Spring Harbor Laboratory, Cold Spring Harbor Laboratory Press, Cold Spring Harbor, N.Y., 1989, and other laboratory manuals such as Methods in Molecular Biology, 1995, Vol. 44, Agrobacterium protocols, ed: Gartland and Davey, Humana Press, Totowa, N.J. As biotic and abiotic stress tolerance is a general trait wished to be inherited into a wide variety of plants like maize, wheat, rye, oat, triticale, rice, barley, soybean, peanut, cotton, rapeseed and canola, manihot, pepper, sunflower and tagetes, solanaceous plants like potato, tobacco, eggplant, and tomato, Vicia species, pea, alfalfa, bushy plants (coffee, cacao, tea), Salix species, trees (oil palm, coconut), perennial grasses, and forage crops, these crop plants are also preferred target plants for a genetic engineering as one further embodiment of the present invention. Forage crops include, but are not limited to, Wheatgrass, Canarygrass, Bromegrass, Wildrye Grass, Bluegrass, Orchardgrass, Alfalfa, Salfoin, Birdsfoot Trefoil, Alsike Clover, Red Clover, and Sweet Clover.

[0167] In one embodiment of the present invention, transfection of a nucleic acid molecule coding for DROP as depicted in table II, column 5 or 7 into a plant is achieved by Agrobacterium mediated gene transfer. Agrobacterium mediated plant transformation can be performed using for example the GV3101(pMP90) (Koncz and Schell, 1986, Mol. Gen. Genet. 204:383-396) or LBA4404 (Clontech) Agrobacterium tumefaciens strain. Transformation can be performed by standard transformation and regeneration techniques (Deblaere et al., 1994, Nucl. Acids Res. 13:4777-4788; Gelvin, Stanton B. and Schilperoort, Robert A, Plant Molecular Biology Manual, 2^{nd} Ed.—Dordrecht: Kluwer Academic Publ., 1995.—in Sect., Ringbuc Zentrale Signatur: BT11-P ISBN 0-7923-2731-4; Glick, Bernard R.; Thompson, John E., Methods in Plant Molecular Biology and Biotechnology, Boca Raton: CRC Press, 1993 360 S., ISBN 0-8493-5164-2). For example, rapeseed can be transformed via cotyledon or hypocotyl transformation (Moloney et al., 1989, Plant cell Report 8:238-242; De Block et al., 1989, Plant Physiol. 91:694-701). Use of antibiotics for Agrobacterium and plant selection depends on the binary vector and the Agrobacterium strain used for transformation. Rapeseed selection is normally performed using kanamycin as selectable plant marker. Agrobacterium mediated gene transfer to flax can be performed using, for example, a technique described by Mlynarova et al., 1994, Plant Cell Report 13:282-285. Additionally, transformation of soybean can be performed using for example a technique described in European Patent No. 0424 047, U.S. Pat. No. 5,322,783, European Patent No. 0397 687, U.S. Pat. No. 5,376,543, or U.S. Pat. No. 5,169,770. Transformation of maize can be achieved by particle bombardment, polyethylene glycol mediated DNA uptake or via the silicon carbide fiber technique. (See, for example, Freeling and Walbot “The maize handbook” Springer Verlag New York (1993) ISBN 3-540-97826-7). A specific example of maize transformation is found in U.S. Pat. No. 5,990,387, and a specific example of wheat transformation can be found in PCT Application No. WO 93/07256.

[0168] According to the present invention, the introduced nucleic acid molecule coding for DRCP as depicted in table II, column 5 or 7 may be maintained in the plant cell stably if it is incorporated into a non-chromosomal autonomous replicon or integrated into the plant chromosomes or organelle genome. Alternatively, the introduced DRCP may be present on an extra-chromosomal non-replicating vector and be transiently expressed or transiently active.

[0169] In one embodiment, a homologous recombinant microorganism can be created wherein the DRCP is integrated into a chromosome, a vector is prepared which contains at least a portion of a nucleic acid molecule coding for DRCP as depicted in table II, column 5 or 7 into which a deletion, addition, or substitution has been introduced to thereby alter, e.g., functionally disrupt, the DRCP gene. Preferably, the DRCP gene is a yeast or a E. coli. gene, but it can be a homolog from a related plant or even from a mammalian or insect source. The vector can be designed such that, upon homologous recombination, the endogenous nucleic acid molecule coding for DRCP as depicted in table II, column 5 or 7 is mutated or otherwise altered but still encodes a functional polypeptide (e.g., the upstream regulatory region can be altered to thereby alter the expression of the endogenous DRCP). In a preferred embodiment the biological activity of the protein of the invention is increased upon homologous recombination. To create a point mutation via homologous recombination, DNA-RNA hybrids can be used in a technique known as chimeraplasty (Cole-Strauss et al., 1999, Nucleic Acids Research 27(5):1323-1330 and Kmiec, 1999 Gene therapy American Scientist. 87(3):240-247). Homologous recombination procedures in Physcomitrella patens are also well known in the art and are contemplated for use herein.

[0170] Whereas in the homologous recombination vector, the altered portion of the nucleic acid molecule coding for DRCP as depicted in table II, column 5 or 7 is flanked at its 5′ and 3′ ends by an additional nucleic acid molecule of the DRCP gene to allow for homologous recombination to occur between the exogenous DRCP gene carried by the vector and an endogenous DRCP gene, in a microorganism or plant. The additional flanking DRCP nucleic acid molecule is of sufficient length for successful homologous recombination with the endogenous gene. Typically, several hundreds of base pairs up to kilobases of flanking DNA (both at the 5′ and 3′ ends) are included in the vector. See, e.g., Thomas, K. R., and Capecchi, M. R., 1987, Cell 51:503 for a description of homologous recombination vectors or Strepp et al., 1998, PNAS, 95 (8):4368-4373 for cDNA based recombination in Physcomitrella patens). The vector is introduced into a microorganism or plant cell (e.g., via polyethylene glycol mediated DNA), and cells in which the introduced DRCP gene has homologously recombined with the endogenous DRCP gene are selected using art-known techniques.

[0171] Whether present in an extra-chromosomal non-replicating vector or a vector that is integrated into a chromosome, the nucleic acid molecule coding for DRCP as depicted in table II, column 5 or 7 preferably resides in a plant expression cassette. A plant expression cassette preferably contains regulatory sequences capable of driving gene expression in plant cells that are operatively linked so that each sequence can fulfill its function, for example, termination of transcription by polyadenylation signals. Preferred polyadenylation signals are those originating from Agrobacterium tumefaciens t-DNA such as the gene 3 known as octopine synthase of the Ti-plasmid pTiACH5 (Gielen et al., 1984, EMBO J. 3:835) or functional equivalents thereof but also all other terminators functionally active in plants are suitable. As plant gene expression is very often not limited on transcriptional levels, a plant expression cassette preferably contains other operatively linked sequences like translational enhancers such as the overdrive-sequence containing the 5″-untranslated leader sequence from tobacco mosaic virus enhancing the polypeptide per RNA ratio (Gallie et al., 1987, Nucl. Acids Research 15:8693-8711). Examples of plant expression vectors include those detailed in: Becker, D. et al., 1992, New plant binary vectors with selectable markers located proximal to the left border, Plant Mol. Biol. 20: 1195-1197; and Bevan, M. W., 1984, Binary Agrobacterium vectors for plant transformation, Nucl. Acid. Res. 12:8711-8721; and Vectors for Gene Transfer in Higher Plants; in: Transgenic Plants, Vol. 1, Engineering and Utilization, eds.: Kung and R. Wu, Academic Press, 1993, S. 15-38.

[0172] “Transformation” is defined herein as a process for introducing heterologous DNA into a plant cell, plant tissue, or plant. It may occur under natural or artificial conditions using various methods well known in the art. Transformation may rely on any known method for the insertion of foreign nucleic acid sequences into aprokaryotic or eukaryotic host cell. The method is selected based on the host cell being transformed and may include, but is not limited to, viral infection, electroporation, lipofection, and particle bombardment. Such “transformed” cells include stably transformed cells in which the inserted DNA is capable of replication either as an autonomously replicating plasmid or as part of the host chromosome. They also include cells which transiently express the inserted DNA or RNA for limited periods of time. Transformed plant cells, plant tissue, or plants are understood to encompass not only the end product of a transformation process, but also transgenic progeny thereof.

The terms “transformed,” “transgenic,” and “recombinant” refer to a host organism such as a bacterium or a plant into which a heterologous nucleic acid molecule has been introduced. The nucleic acid molecule can be stably integrated into the genome of the host or the nucleic acid molecule can also be present as an extrachromosomal molecule. Such an extrachromosomal molecule can be auto-replicating. Transformed cells, tissues, or plants are understood to encompass not only the end product of a transformation process, but also transgenic progeny thereof. A “non-transformed,” “non-transgenic,” or “non-recombinant” host refers to a wild-type organism, e.g., a bacterium or plant, which does not contain the heterologous nucleic acid molecule.
A “transgenic plant”, as used herein, refers to a plant which contains a foreign nucleotide sequence inserted into either its nuclear genome or organellar genome. It encompasses further the offspring generations i.e. the T1-, T2- and consecutively generations or BC1-, BC2- and consecutively generation as well as crossbreeds thereof with non-transgenic or other transgenic plants.

[0173] The host organism (=transgenic organism) advantageously contains at least one copy of the nucleic acid according to the invention and/or of the nucleic acid construct according to the invention.

In principle all plants can be used as host organism. Preferred transgenic plants are, for example, selected from the families Aceraceae, Anacardiaceae, Apiaceae, Asteraceae, Brassicaceae, Cactaceae, Cucurbitaceae, Euphorbiaceae, Fabaceae, Malvaceae, Nymphaeaceae, Papaveraceae, Rosaceae, Salicaceae, Solanaceae, Arecaceae, Bromeliaceae, Cyperaceae, lridaceae, Liliaceae, Orchidaceae, Gentianaceae, Labiaceae, Magnoliaceae, Ranunculaceae, Carifolaceae, Rubiaceae, Scrophulariaceae, Caryophyllaceae, Ericaceae, Polygonaceae, Violaceae, Juncaceae or Poaceae and preferably from a plant selected from the group of the families Apiaceae, Asteraceae, Brassicaceae, Cucurbitaceae, Fabaceae, Papaveraceae, Rosaceae, Solanaceae, Liliaceae or Poaceae. Preferred are crop plants such as plants advantageously selected from the group of the genus peanut, oilseed rape, canola, sunflower, safflower, olive, sesame, hazelnut, almond, avocado, bay, pumpkin/squash, linseed, soya, pistachio, borage, maize, wheat, rye, oats, sorghum and millet, triticale, rice, barley, cassaya, potato, sugarbeet, egg plant, alfalfa, and perennial grasses and forage plants, oil palm, vegetables (brassicas, root vegetables, tuber vegetables, pod vegetables, fruiting vegetables, onion vegetables, leafy vegetables and stem vegetables), buckwheat, Jerusalem artichoke, broad bean, vetches, lentil, dwarf bean, lupin, clover and Lucerne for mentioning only some of them.
In one embodiment of the invention transgenic plants are selected from the group comprising corn, soy, oil seed rape (including canola and winter oil seed reap), cotton, wheat and rice.
In one preferred embodiment, the host plant is selected from the families Aceraceae, Anacardiaceae, Apiaceae, Asteraceae, Brassicaceae, Cactaceae, Cucurbitaceae, Euphorbiaceae, Fabaceae, Malvaceae, Nymphaeaceae, Papaveraceae, Rosaceae, Salicaceae, Solanaceae, Arecaceae, Bromeliaceae, Cyperaceae, lridaceae, Liliaceae, Orchidaceae, Gentianaceae, Labiaceae, Magnoliaceae, Ranunculaceae, Carifolaceae, Rubiaceae, Scrophulariaceae, Caryophyllaceae, Ericaceae, Polygonaceae, Violaceae, Juncaceae or Poaceae and preferably from a plant selected from the group of the families Apiaceae, Asteraceae, Brassicaceae, Cucurbitaceae, Fabaceae, Papaveraceae, Rosaceae, Solanaceae, Liliaceae or Poaceae. Preferred are crop plants and in particular plants mentioned herein above as host plants such as the families and genera mentioned above for example preferred the species Anacardium occidentale, Calendula officinalis, Carthamus tinctorius, Cichorium intybus, Cynara scolymus, Helianthus annus, Tagetes lucida, Tagetes erecta, Tagetes tenuifolia; Daucus carota; Corylus avellana, Corylus colurna, Borago officinalis; Brassica napus, Brassica rapa ssp., Sinapis arvensis Brassica juncea, Brassica juncea var. juncea, Brassica juncea var. crispifolia, Brassica juncea var. foliosa, Brassica nigra, Brassica sinapioides, Melanosinapis communis, Brassica oleracea, Arabidopsis thaliana, Anana comosus, Ananas ananas, Bromelia comosa, Carica papaya, Cannabis sative, Ipomoea batatus, Ipomoea pandurata, Convolvulus batatas, Convolvulus tiliaceus, Ipomoea fastigiata, Ipomoea tiliacea, Ipomoea triloba, Convolvulus panduratus, Beta vulgaris, Beta vulgaris var. altissima, Beta vulgaris var. vulgaris, Beta maritima, Beta vulgaris var. perennis, Beta vulgaris var. conditiva, Beta vulgaris var. esculenta, Cucurbita maxima, Cucurbita mixta, Cucurbita pepo, Cucurbita moschata, Olea europaea, Manihot utilissima, Janipha manihot, Jatropha manihot, Manihot aipil, Manihot dulcis, Manihot manihot, Manihot melanobasis, Manihot esculenta, Ricinus communis, Pisum sativum, Pisum arvense, Pisum humile, Medicago sativa, Medicago falcata, Medicago varia, Glycine max Dolichos soja, Glycine gracilis, Glycine hispida, Phaseolus max, Soja hispida, Soja max, Cocos nucifera, Pelargonium grossularioides, Oleum cocoas, Laurus nobilis, Persea americana, Arachis hypogaea, Linum usitatissimum, Linum humile, Linum austriacum, Linum bienne, Linum angustifolium, Linum catharticum, Linum flavum, Linum grandiflorum, Adenolinum grandiflorum, Linum lewisii, Linum narbonense, Linum perenne, Linum perenne var. lewisii, Linum pratense, Linum trigynum, Punica granatum, Gossypium hirsutum, Gossypium arboreum, Gossypium barbadense, Gossypium herbaceum, Gossypium thurberi, Musa nana, Musa acuminata, Musa paradisiaca, Musa spp., Elaeis guineensis, Papaver orientale, Papaver rhoeas, Papaver dubium, Sesamum indicum, Piper aduncum, Piper amalago, Piper angustifolium, Piper auritum, Piper betel, Piper cubeba, Piper longum, Piper nigrum, Piper retrofractum, Artanthe adunca, Artanthe elongata, Peperomia elongata, Piper elongatum, Steffensia elongata, Hordeum vulgare, Hordeum jubatum, Hordeum murinum, Hordeum secalinum, Hordeum distichon Hordeum aegiceras, Hordeum hexastichon, Hordeum hexastichum, Hordeum irregulare, Hordeum sativum, Hordeum secalinum, Avena sativa, Avena fatua, Avena byzantina, Avena fatua var. sativa, Avena hybrida, Sorghum bicolor, Sorghum halepense, Sorghum saccharatum, Sorghum vulgare, Andropogon drummondii, Holcus bicolor, Holcus sorghum, Sorghum aethiopicum, Sorghum arundinaceum, Sorghum caffrorum, Sorghum cernuum, Sorghum dochna, Sorghum drummondii, Sorghum durra, Sorghum guineense, Sorghum lanceolatum, Sorghum nervosum, Sorghum saccharatum, Sorghum subglabrescens, Sorghum verticiffiflorum, Sorghum vulgare, Holcus halepensis, Sorghum miliaceum millet, Panicum militaceum, Zea mays, Triticum aestivum, Triticum durum, Triticum turgidum, Triticum hybernum, Triticum macha, Triticum sativum or Triticum vulgare, Cofea spp., Coffea arabica, Coffea canephora, Coffea liberica, Capsicum annuum, Capsicum annuum var. glabriusculum, Capsicum frutescens, Capsicum annuum, Nicotiana tabacum, Solanum tuberosum, Solanum melongena, Lycopersicon esculentum, Lycopersicon lycopersicum, Lycopersicon pyriforme, Solanum integrifolium, Solanum lycopersicum Theobroma cacao or Camellia sinensis.
Anacardiaceae such as the genera Pistacia, Mangifera, Anacardium e.g. the species Pistacia vera [pistachios, Pistazie], Mangifer indica [Mango] or Anacardium occidentale [Cashew]; Asteraceae such as the genera Calendula, Carthamus, Centaurea, Cichorium, Cynara, Helianthus, Lactuca, Locusta, Tagetes, Valeriana e.g. the species Calendula officinalis [Marigold], Carthamus tinctorius [safflower], Centaurea cyanus [cornflower], Cichorium intybus [blue daisy], Cynara scolymus [Artichoke], Helianthus annus [sunflower], Lactuca sativa, Lactuca crispa, Lactuca esculenta, Lactuca scariola L. ssp. sativa, Lactuca scariola L. var. integrate, Lactuca scariola L. var. integrifolia, Lactuca sativa subsp. romana, Locusta communis, Valeriana locusta [lettuce], Tagetes lucida, Tagetes erecta or Tagetes tenuifolia [Marigold]; Apiaceae such as the genera Daucus e.g. the species Daucus carota [carrot]; Betulaceae such as the genera Corylus e.g. the species Corylus avellana or Corylus colurna [hazelnut]; Boraginaceae such as the genera Borago e.g. the species Borago officinalis [borage]; Brassicaceae such as the genera Brassica, Melanosinapis, Sinapis, Arabadopsis e.g. the species Brassica napus, Brassica rapa ssp. [canola, oilseed rape, turnip rape], Sinapis arvensis Brassica juncea, Brassica juncea var. juncea, Brassica juncea var. crispifolia, Brassica juncea var. foliosa, Brassica nigra, Brassica sinapioides, Melanosinapis communis [mustard], Brassica oleracea [fodder beet] or Arabidopsis thaliana; Bromeliaceae such as the genera Anana, Bromelia e.g. the species Anana comosus, Ananas ananas or Bromelia comosa [pineapple]; Caricaceae such as the genera Carica e.g. the species Carica papaya [papaya]; Cannabaceae such as the genera Cannabis e.g. the species Cannabis sative [hemp], Convolvulaceae such as the genera Ipomea, Convolvulus e.g. the species Ipomoea batatus, Ipomoea pandurata, Convolvulus batatas, Convolvulus tiliaceus, Ipomoea fastigiata, Ipomoea tiliacea, Ipomoea triloba or Convolvulus panduratus [sweet potato, Man of the Earth, wild potato], Chenopodiaceae such as the genera Beta, i.e. the species Beta vulgaris, Beta vulgaris var. altissima, Beta vulgaris var. Vulgaris, Beta maritima, Beta vulgaris var. perennis, Beta vulgaris var. conditiva or Beta vulgaris var. esculenta [sugar beet]; Cucurbitaceae such as the genera Cucubita e.g. the species Cucurbita maxima, Cucurbita mixta, Cucurbita pepo or Cucurbita moschata [pumpkin, squash]; Elaeagnaceae such as the genera Elaeagnus e.g. the species Olea europaea [olive]; Ericaceae such as the genera Kalmia e.g. the species Kalmia latifolia, Kalmia angustifolia, Kalmia microphylla, Kalmia polifolia, Kalmia occidentalis, Cistus chamaerhodendros or Kalmia lucida [American laurel, broad-leafed laurel, calico bush, spoon wood, sheep laurel, alpine laurel, bog laurel, western bog-laurel, swamp-laurel]; Euphorbiaceae such as the genera Manihot, Janipha, Jatropha, Ricinus e.g. the species Manihot utilissima, Janipha manihot, Jatropha manihot, Manihot aipil, Manihot dulcis, Manihot manihot, Manihot melanobasis, Manihot esculenta [manihot, arrowroot, tapioca, cassaya] or Ricinus communis [castor bean, Castor Oil Bush, Castor Oil Plant, Palma Christi, Wonder Tree]; Fabaceae such as the genera Pisum, Albizia, Cathormion, Feuillea, Inga, Pithecolobium, Acacia, Mimosa, Medicajo, Glycine, Dolichos, Phaseolus, Soja e.g. the species Pisum sativum, Pisum arvense, Pisum humile [pea], Albizia berteriana, Albizia julibrissin, Albizia lebbeck, Acacia berteriana, Acacia littoralis, Albizia berteriana, Albizzia berteriana, Cathormion berteriana, Feuillea berteriana, Inge fragrans, Pithecellobium berterianum, Pithecellobium fragrans, Pithecolobium berterianum, Pseudalbizzia berteriana, Acacia julibrissin, Acacia nemu, Albizia nemu, Feuilleea julibrissin, Mimosa julibrissin, Mimosa speciosa, Sericanrda julibrissin, Acacia lebbeck, Acacia macrophylla, Albizia lebbek, Feuilleea lebbeck, Mimosa lebbeck, Mimosa speciosa [bastard logwood, silk tree, East Indian Walnut], Medicago sativa, Medicago falcate, Medicago varia [alfalfa] Glycine max Dolichos soja, Glycine gracilis, Glycine hispida, Phaseolus max, Soja hispida or Soja max [soybean]; Geraniaceae such as the genera Pelargonium, Cocos, Oleum e.g. the species Cocos nucifera, Pelargonium grossularioides or Oleum cocois [coconut]; Gramineae such as the genera Saccharum e.g. the species Saccharum officinarum; Juglandaceae such as the genera Juglans, Wallia e.g. the species Juglans regia, Juglans ailanthifolia, Juglans sieboldiana, Juglans cinerea, Wallia cinerea, Juglans bixbyi, Juglans californica, Juglans hindsii, Juglans intermedia, Juglans jamaicensis, Juglans major, Juglans microcarpa, Juglans nigra or Wallia nigra [walnut, black walnut, common walnut, persian walnut, white walnut, butternut, black walnut]; Lauraceae such as the genera Persea, Laurus e.g. the species laurel Laurus nobilis [bay, laurel, bay laurel, sweet bay], Persea americana Persea americana, Persea gratissima or Persea persea [avocado]; Leguminosae such as the genera Arachis e.g. the species Arachis hypogaea [peanut]; Linaceae such as the genera Linum, Adenolinum e.g. the species Linum usitatissimum, Linum humile, Linum austriacum, Linum bienne, Linum angustifolium, Linum catharticum, Linum flavum, Linum grandiflorum, Adenolinum grandiflorum, Linum lewisii, Linum narbonense, Linum perenne, Linum perenne var. lewisii, Linum pratense or Linum trigynum [flax, linseed]; Lythrarieae such as the genera Punica e.g. the species Punica granatum [pomegranate]; Malvaceae such as the genera Gossypium e.g. the species Gossypium hirsutum, Gossypium arboreum, Gossypium barbadense, Gossypium herbaceum or Gossypium thurberi [cotton]; Musaceae such as the genera Musa e.g. the species Musa nana, Musa acuminata, Musa paradisiaca, Musa spp. [banana]; Onagraceae such as the genera Camissonia, Oenothera e.g. the species Oenothera biennis or Camissonia brevipes [primrose, evening primrose]; Palmae such as the genera Elacis e.g. the species Elaeis guineensis [oil plam]; Papaveraceae such as the genera Papaver e.g. the species Papaver orientate, Papaver rhoeas, Papaver dubium [poppy, oriental poppy, corn poppy, field poppy, shirley poppies, field poppy, long-headed poppy, long-pod poppy]; Pedaliaceae such as the genera Sesamum e.g. the species Sesamum indicum [sesame]; Piperaceae such as the genera Piper, Artanthe, Peperomia, Steffensia e.g. the species Piper aduncum, Piper amalago, Piper angustifolium, Piper auritum, Piper betel, Piper cubeba, Piper longum, Piper nigrum, Piper retrofractum, Artanthe adunca, Artanthe elongate, Peperomia elongate, Piper elongatum, Steffensia elongate. [Cayenne pepper, wild pepper]; Poaceae such as the genera Hordeum, Secale, Avena, Sorghum, Andropogon, Holcus, Panicum, Oryza, Zea, Triticum e.g. the species Hordeum vulgare, Hordeum jubatum, Hordeum murinum, Hordeum secalinum, Hordeum distichon Hordeum aegiceras, Hordeum hexastichon, Hordeum hexastichum, Hordeum irregulare, Hordeum sativum, Hordeum secalinum [barley, pearl barley, foxtail barley, wall barley, meadow barley], Secale cereale [rye], Avena sativa, Avena fatua, Avena byzantina, Avena fatua var. sativa, Avena hybrida [oat], Sorghum bicolor, Sorghum halepense, Sorghum saccharatum, Sorghum vulgare, Andropogon drummondii, Holcus bicolor, Holcus sorghum, Sorghum aethiopicum, Sorghum arundinaceum, Sorghum caffrorum, Sorghum cernuum, Sorghum dochna, Sorghum drummondii, Sorghum durra, Sorghum guineense, Sorghum lanceolatum, Sorghum nervosum, Sorghum saccharatum, Sorghum subglabrescens, Sorghum verticilliflorum, Sorghum vulgare, Holcus halepensis, Sorghum miliaceum millet, Panicum militaceum [Sorghum, millet], Oryza sativa, Oryza latifolia [rice], Zea mays [corn, maize] Triticum aestivum, Triticum durum, Triticum turgidum, Triticum hybernum, Triticum macha, Triticum sativum or Triticum vulgare [wheat, bread wheat, common wheat], Proteaceae such as the genera Macadamia e.g. the species Macadamia intergrifolia [macadamia]; Rubiaceae such as the genera Coffea e.g. the species Cofea spp., Coffea arabica, Coffea canephora or Coffea liberica [coffee]; Scrophulariaceae such as the genera Verbascum e.g. the species Verbascum blattaria, Verbascum chaixii, Verbascum densiflorum, Verbascum lagurus, Verbascum longifolium, Verbascum lychnitis, Verbascum nigrum, Verbascum olympicum, Verbascum phlomoides, Verbascum phoenicum, Verbascum pulverulentum or Verbascum thapsus [mullein, white moth mullein, nettle-leaved mullein, dense-flowered mullein, silver mullein, long-leaved mullein, white mullein, dark mullein, greek mullein, orange mullein, purple mullein, hoary mullein, great mullein]; Solanaceae such as the genera Capsicum, Nicotiana, Solanum, Lycopersicon e.g. the species Capsicum annuum, Capsicum annuum var. glabriusculum, Capsicum frutescens [pepper], Capsicum annuum [paprika], Nicotiana tabacum, Nicotiana alata, Nicotiana attenuata, Nicotiana glauca, Nicotiana langsdorffii, Nicotiana obtusifolia, Nicotiana quadrivalvis, Nicotiana repanda, Nicotiana rustica, Nicotiana sylvestris [tobacco], Solanum tuberosum [potato], Solanum melongena [egg-plant] (Lycopersicon esculentum, Lycopersicon lycopersicum, Lycopersicon pyriforme, Solanum integrifolium or Solanum lycopersicum [tomato]; Sterculiaceae such as the genera Theobroma e.g. the species Theobroma cacao [cacao]; Theaceae such as the genera Camellia e.g. the species Camellia sinensis) [tea].

[0174] The introduction of the nucleic acids according to the invention, the expression cassette or the vector into organisms, plants for example, can in principle be done by all of the methods known to those skilled in the art. The introduction of the nucleic acid sequences gives rise to recombinant or transgenic organisms.

[0175] Unless otherwise specified, the terms “polynucleotides”, “nucleic acid” and “nucleic acid molecule” as used herein are interchangeably. Unless otherwise specified, the terms “peptide”, “polypeptide” and “protein” are interchangeably in the present context. The term “sequence” may relate to polynucleotides, nucleic acids, nucleic acid molecules, peptides, polypeptides and proteins, depending on the context in which the term “sequence” is used. The terms “gene(s)”, “polynucleotide”, “nucleic acid sequence”, “nucleotide sequence”, or “nucleic acid molecule(s)” as used herein refers to a polymeric form of nucleotides of any length, either ribonucleotides or deoxyribonucleotides. The terms refer only to the primary structure of the molecule.

[0176] Thus, the terms “gene(s)”, “polynucleotide”, “nucleic acid sequence”, “nucleotide sequence”, or “nucleic acid molecule(s)” as used herein include double- and single-stranded DNA and RNA. They also include known types of modifications, for example, methylation, “caps”, substitutions of one or more of the naturally occurring nucleotides with an analog. Preferably, the DNA or RNA sequence of the invention comprises a coding sequence encoding the herein defined polypeptide.

[0177] The genes of the invention, coding for an activity selected from the group consisting the polypeptides as disclosed in Table II are also called “DROP gene”.

[0178] A “coding sequence” is a nucleotide sequence, which is transcribed into mRNA and/or translated into a polypeptide when placed under the control of appropriate regulatory sequences. The boundaries of the coding sequence are determined by a translation start codon at the 5′-terminus and a translation stop codon at the 3′-terminus. A coding sequence can include, but is not limited to mRNA, cDNA, recombinant nucleotide sequences or genomic DNA, while introns may be present as well under certain circumstances.

[0179] The transfer of foreign genes into the genome of a plant is called transformation. In doing this the methods described for the transformation and regeneration of plants from plant tissues or plant cells are utilized for transient or stable transformation. Suitable methods are protoplast transformation by poly(ethylene glycol)-induced DNA uptake, the “biolistic” method using the gene cannon—referred to as the particle bombardment method, electroporation, the incubation of dry embryos in DNA solution, microinjection and gene transfer mediated by Agrobacterium. Said methods are described by way of example in B. Jenes et al., Techniques for Gene Transfer, in: Transgenic Plants, Vol. 1, Engineering and Utilization, eds. S. D. Kung and R. Wu, Academic Press (1993) 128-143 and in Potrykus Annu. Rev. Plant Physiol. Plant Molec. Biol. 42 (1991) 205-225). The nucleic acids or the construct to be expressed is preferably cloned into a vector which is suitable for transforming Agrobacterium tumefaciens, for example pBin19 (Bevan et al., Nucl. Acids Res. 12 (1984) 8711). Agrobacteria transformed by such a vector can then be used in known manner for the transformation of plants, in particular of crop plants such as by way of example tobacco plants, for example by bathing bruised leaves or chopped leaves in an agrobacterial solution and then culturing them in suitable media. The transformation of plants by means of Agrobacterium tumefaciens is described, for example, by Hofgen and Willmitzer in Nucl. Acid Res. (1988) 16, 9877 or is known inter alia from F. F. White, Vectors for Gene Transfer in Higher Plants; in Transgenic Plants, Vol. 1, Engineering and Utilization, eds. S. D. Kung and R. Wu, Academic Press, 1993, pp. 15-38.

[0180] Agrobacteria transformed by an expression vector according to the invention may likewise be used in known manner for the transformation of plants such as test plants like Arabidopsis or crop plants such as cereal crops, corn, oats, rye, barley, wheat, soybean, rice, cotton, sugar beet, canola, sunflower, flax, hemp, potatoes, tobacco, tomatoes, carrots, paprika, oilseed rape, tapioca, cassaya, arrowroot, tagetes, alfalfa, lettuce and the various tree, nut and vine species, in particular of oil-containing crop plants such as soybean, peanut, castor oil plant, sunflower, corn, cotton, flax, oilseed rape, coconut, oil palm, safflower (Carthamus tinctorius) or cocoa bean, e.g. by bathing bruised leaves or chopped leaves in an agrobacterial solution and then culturing them in suitable media.

The genetically modified plant cells may be regenerated by all of the methods known to those skilled in the art. Appropriate methods can be found in the publications referred to above by S. D. Kung and R. Wu, Potrykus or Hofgen and Willmitzer.

[0181] Accordingly, a further aspect of the invention relates to transgenic organisms transformed by at least one nucleic acid sequence, expression cassette or vector according to the invention as well as cells, cell cultures, tissue, parts—such as, for example, leaves, roots, etc. in the case of plant organisms—or reproductive material derived from such organisms. The terms “host organism”, “host cell”, “recombinant (host) organism” and “transgenic (host) cell” are used here interchangeably. Of course these terms relate not only to the particular host organism or the particular target cell but also to the descendants or potential descendants of these organisms or cells. Since, due to mutation or environmental effects certain modifications may arise in successive generations, these descendants need not necessarily be identical with the parental cell but nevertheless are still encompassed by the term as used here.

For the purposes of the invention “transgenic” or “recombinant” means with regard for example to a nucleic acid sequence, an expression cassette (=gene construct, nucleic acid construct) or a vector containing the nucleic acid sequence according to the invention or an organism transformed by the nucleic acid sequences, expression cassette or vector according to the invention all those constructions produced by genetic engineering methods in which either
[0182] a) the nucleic acid sequence depicted in table I, column 5 or 7 or its derivatives or parts thereof or
[0183] b) a genetic control sequence functionally linked to the nucleic acid sequence described under (a), for example a 3′- and/or 5′-genetic control sequence such as a promoter or terminator, or
[0184] c) (a) and (b)
   are not found in their natural, genetic environment or have been modified by genetic engineering methods, wherein the modification may by way of example be a substitution, addition, deletion, inversion or insertion of one or more nucleotide residues. Natural genetic environment means the natural genomic or chromosomal locus in the organism of origin or inside the host organism or presence in a genomic library. In the case of a genomic library the natural genetic environment of the nucleic acid sequence is preferably retained at least in part. The environment borders the nucleic acid sequence at least on one side and has a sequence length of at least 50 bp, preferably at least 500 bp, particularly preferably at least 1,000 bp, most particularly preferably at least 5,000 bp. A naturally occurring expression cassette—for example the naturally occurring combination of the natural promoter of the nucleic acid sequence according to the invention with the corresponding delta-8-desaturase, delta-9-elongase and/or delta-5-desaturase gene—turns into a transgenic expression cassette when the latter is modified by unnatural, synthetic (“artificial”) methods such as by way of example a mutagenation. Appropriate methods are described by way of example in U.S. Pat. No. 5,565,350 or WO 00/15815.

[0185] Suitable organisms or host organisms for the nucleic acid, expression cassette or vector according to the invention are advantageously in principle all organisms, which are suitable for the expression of recombinant genes as described above. Further examples which may be mentioned are plants such as Arabidopsis, Asteraceae such as Calendula or crop plants such as soybean, peanut, castor oil plant, sunflower, flax, corn, cotton, flax, oilseed rape, coconut, oil palm, safflower (Carthamus tinctorius) or cocoa bean.

In one embodiment of the invention host plants for the nucleic acid, expression cassette or vector according to the invention are selected from the group comprising corn, soy, oil seed rape (including canola and winter oil seed reap), cotton, wheat and rice.

[0186] A further object of the invention relates to the use of a nucleic acid construct, e.g. an expression cassette, containing DNA sequences encoding polypeptides shown in table II or DNA sequences hybridizing therewith for the transformation of plant cells, tissues or parts of plants.

In doing so, depending on the choice of promoter, the sequences of shown in table I can be expressed specifically in the leaves, in the seeds, the nodules, in roots, in the stem or other parts of the plant. Those transgenic plants overproducing sequences as depicted in table I , the reproductive material thereof, together with the plant cells, tissues or parts thereof are a further object of the present invention.
The expression cassette or the nucleic acid sequences or construct according to the invention containing sequences according to table I can, moreover, also be employed for the transformation of the organisms identified by way of example above such as bacteria, yeasts, filamentous fungi and plants.

[0187] Within the framework of the present invention, increased resistance to plant disease, preferably pathogenic fungi and/or nematodes means, for example, the artificially acquired trait of increased resistance to plant disease, preferably pathogenic fungi and/or nematodes due to functional expression or over expression of polypeptide sequences of table II encoded by the corresponding nucleic acid molecules as depicted in table I, column 5 or 7 and/or homologs in the organisms according to the invention, advantageously in the transgenic plants according to the invention, by comparison with the nongenetically modified initial plants at least for the duration of at least one plant generation.

[0188] A constitutive expression of the polypeptide sequences of the of table II encoded by the corresponding nucleic acid molecule as depicted in table I, column 5 or 7 and/or homologs is, moreover, advantageous. On the other hand, however, an inducible expression may also appear desirable. Expression of the polypeptide sequences of the invention can be either accure “direct” in the cytsoplasm, eg from a nucleus transformed or encoded gene, or in the organelles preferably the plastids of the host cells, preferably the plant cells.

The efficiency of the expression of the sequences of the of table II encoded by the corresponding nucleic acid molecule as depicted in table I, column 5 or 7 and/or homologs can be determined, for example, in vitro by shoot meristem propagation. In addition, an expression of the sequences of table II encoded by the corresponding nucleic acid molecule as depicted in table I, column 5 or 7 and/or homologs modified in nature and level and its effect on the stress resistance can be tested on test plants in greenhouse trials.

[0189] An additional object of the invention comprises transgenic organisms such as transgenic plants transformed by an expression cassette containing sequences of as depicted in table I, column 5 or 7 according to the invention or DNA sequences hybridizing therewith, as well as transgenic cells, tissue, parts and reproduction material of such plants. Particular preference is given in this case to transgenic crop plants such as by way of example barley, wheat, rye, oats, corn, soybean, rice, cotton, sugar beet, oilseed rape and canola, sunflower, flax, hemp, thistle, potatoes, tobacco, tomatoes, tapioca, cassaya, arrowroot, alfalfa, lettuce and the various tree, nut and vine species.

In one embodiment of the invention transgenic plants transformed by an expression cassette containing sequences of as depicted in table I, column 5 or 7 according to the invention or DNA sequences hybridizing therewith are selected from the group comprising corn, soy, oil seed rape (including canola and winter oil seed rape), cotton, wheat and rice.

[0190] For the purposes of the invention plants are mono- and dicotyledonous plants, mosses or algae.

A further refinement according to the invention are transgenic plants as described above which contain a nucleic acid sequence or construct according to the invention or a expression cassette according to the invention.

[0191] However, transgenic also means that the nucleic acids according to the invention are located at their natural position in the genome of an organism, but that the sequence has been modified in comparison with the natural sequence and/or that the regulatory sequences of the natural sequences have been modified. Preferably, transgenic/recombinant is to be understood as meaning the transcription of the nucleic acids of the invention and shown in table I, occurs at a non-natural position in the genome, that is to say the expression of the nucleic acids is homologous or, preferably, heterologous. This expression can be transiently or of a sequence integrated stably into the genome.

The term “transgenic plants” used in accordance with the invention also refers to the progeny of a transgenic plant, for example the T₁, T₂, T₃ and subsequent plant generations or the BC₁, BC₂, BC₃ and subsequent plant generations. Thus, the transgenic plants according to the invention can be raised and selfed or crossed with other individuals in order to obtain further transgenic plants according to the invention. Transgenic plants may also be obtained by propagating transgenic plant cells vegetatively. The present invention also relates to transgenic plant material, which can be derived from a transgenic plant population according to the invention. Such material includes plant cells and certain tissues, organs and parts of plants in all their manifestations, such as seeds, leaves, anthers, fibers, tubers, roots, root hairs, stems, embryo, calli, cotelydons, petioles, harvested material, plant tissue, reproductive tissue and cell cultures, which are derived from the actual transgenic plant and/or can be used for bringing about the transgenic plant.
Any transformed plant obtained according to the invention can be used in a conventional breeding scheme or in in vitro plant propagation to produce more transformed plants with the same characteristics and/or can be used to introduce the same characteristic in other varieties of the same or related species. Such plants are also part of the invention. Seeds obtained from the transformed plants genetically also contain the same characteristic and are part of the invention. As mentioned before, the present invention is in principle applicable to any plant and crop that can be transformed with any of the transformation method known to those skilled in the art.

[0192] Advantageous inducible plant promoters are by way of example the PRP1 promoter [Ward et al., Plant. Mol. Biol. 22 (1993), 361-366], a promoter inducible by benzenesulfonamide (EP 388 186), a promoter inducible by tetracycline [Gatz et al., (1992) Plant J. 2, 397-404], a promoter inducible by salicylic acid (WO 95/19443), a promoter inducible by abscisic acid (EP 335 528) and a promoter inducible by ethanol or cyclohexanone (WO93/21334). Other examples of plant promoters which can advantageously be used are the promoter of cytosolic FBPase from potato, the ST-LSI promoter from potato (Stockhaus et al., EMBO J. 8 (1989) 2445-245), the promoter of phosphoribosyl pyrophosphate amidotransferase from Glycine max (see also gene bank accession number U87999) or a nodiene-specific promoter as described in EP 249 676. Particular advantageous are those promoters which ensure expression upon the early onset of environmental stress like for example drought or cold or biotic stress caused by plant diseases.

In one embodiment seed-specific promoters may be used for monocotylodonous or dicotylodonous plants.

[0193] In principle all natural promoters with their regulation sequences can be used like those named above for the expression cassette according to the invention and the method according to the invention. Over and above this, synthetic promoters may also advantageously be used.

In the preparation of an expression cassette various DNA fragments can be manipulated in order to obtain a nucleotide sequence, which usefully reads in the correct direction and is equipped with a correct reading frame. To connect the DNA fragments (=nucleic acids according to the invention) to one another adaptors or linkers may be attached to the fragments.
The promoter and the terminator regions can usefully be provided in the transcription direction with a linker or polylinker containing one or more restriction points for the insertion of this sequence. Generally, the linker has 1 to 10, mostly 1 to 8, preferably 2 to 6, restriction points. In general the size of the linker inside the regulatory region is less than 100 bp, frequently less than 60 bp, but at least 5 bp. The promoter may be both native or homologous as well as foreign or heterologous to the host organism, for example to the host plant. In the 5′-3′ transcription direction the expression cassette contains the promoter, a DNA sequence which shown in table I and a region for transcription termination. Different termination regions can be exchanged for one another in any desired fashion.

[0194] As also used herein, the terms “nucleic acid” and “nucleic acid molecule” are intended to include DNA molecules (e.g., cDNA or genomic DNA) and RNA molecules (e.g., mRNA) and analogs of the DNA or RNA generated using nucleotide analogs. This term also encompasses untranslated sequence located at both the 3′ and 5′ ends of the coding region of the gene: at least about 1000 nucleotides of sequence upstream from the 5′ end of the coding region and at least about 200 nucleotides of sequence downstream from the 3′ end of the coding region of the gene. The nucleic acid molecule can be single-stranded or double-stranded, but preferably is double-stranded DNA.

An “isolated” nucleic acid molecule is one that is substantially separated from other nucleic acid molecules, which are present in the natural source of the nucleic acid. That means other nucleic acid molecules are present in an amount less than 5% based on weight of the amount of the desired nucleic acid, preferably less than 2% by weight, more preferably less than 1% by weight, most preferably less than 0.5% by weight. Preferably, an “isolated” nucleic acid is free of some of the sequences that naturally flank the nucleic acid (i.e., sequences located at the 5′ and 3′ ends of the nucleic acid) in the genomic DNA of the organism from which the nucleic acid is derived. For example, in various embodiments, the isolated stress related protein encoding nucleic acid molecule can contain less than about 5 kb, 4 kb, 3 kb, 2 kb, 1 kb, 0.5 kb or 0.1 kb of nucleotide sequences which naturally flank the nucleic acid molecule in genomic DNA of the cell from which the nucleic acid is derived. Moreover, an “isolated” nucleic acid molecule, such as a cDNA molecule, can be free from some of the other cellular material with which it is naturally associated, or culture medium when produced by recombinant techniques, or chemical precursors or other chemicals when chemically synthesized.

[0195] A nucleic acid molecule of the present invention, e.g., a nucleic acid molecule encoding an DROP or a portion thereof which confers tolerance and/or resistance to environmental stress and increased biomass production in plants, can be isolated using standard molecular biological techniques and the sequence information provided herein. For example, an Arabidopsis thaliana stress related protein encoding cDNA can be isolated from a A. thaliana c-DNA library or a Synechocystis sp., Brassica napus, Glycine max, Zea mays or Oryza sativa stress related protein encoding cDNA can be isolated from a Synechocystis sp., Brassica napus, Glycine max, Zea mays or Oryza sativa c-DNA library respectively using all or portion of one of the sequences shown in table I. Moreover, a nucleic acid molecule encompassing all or a portion of one of the sequences of table I can be isolated by the polymerase chain reaction using oligonucleotide primers designed based upon this sequence. For example, mRNA can be isolated from plant cells (e.g., by the guanidinium-thiocyanate extraction procedure of Chirgwin et al., 1979 Biochemistry 18:5294-5299) and cDNA can be prepared using reverse transcriptase (e.g., Moloney MLV reverse transcriptase, available from Gibco/BRL, Bethesda, Md.; or AMV reverse transcriptase, available from Seikagaku America, Inc., St. Petersburg, Fla.). Synthetic oligonucleotide primers for polymerase chain reaction amplification can be designed based upon one of the nucleotide sequences shown in table I. A nucleic acid molecule of the invention can be amplified using cDNA or, alternatively, genomic DNA, as a template and appropriate oligonucleotide primers according to standard PCR amplification techniques. The nucleic acid molecule so amplified can be cloned into an appropriate vector and characterized by DNA sequence analysis. Furthermore, oligonucleotides corresponding to a DROP encoding nucleotide sequence can be prepared by standard synthetic techniques, e.g., using an automated DNA synthesizer.

In a preferred embodiment, an isolated nucleic acid molecule of the invention comprises one of the nucleotide sequences shown in table I encoding the DROP (i.e., the “coding region”), as well as 5′ untranslated sequences and 3′ untranslated sequences.
Moreover, the nucleic acid molecule of the invention can comprise only a portion of the coding region of one of the sequences ôf the nucleic acid of table I, for example, a fragment which can be used as a probe or primer or a fragment encoding a biologically active portion of a DROP.

[0196] Portions of proteins encoded by the DROP encoding nucleic acid molecules of the invention are preferably biologically active portions described herein. As used herein, the term “biologically active portion of” a DROP is intended to include a portion, e.g., a domain/motif, of stress related protein that participates in a stress tolerance and/or resistance response in a plant. To determine whether a DROP, or a biologically active portion thereof, results in increased stress tolerance in a plant, a stress analysis of a plant comprising the DROP may be performed. Such analysis methods are well known to those skilled in the art, as detailed in the Examples. More specifically, nucleic acid fragments encoding biologically active portions of a DROP can be prepared by isolating a portion of one of the sequences of the nucleic acid of table I expressing the encoded portion of the DROP or peptide (e.g., by recombinant expression in vitro) and assessing the activity of the encoded portion of the DROP or peptide.

Biologically active portions of a DROP are encompassed by the present invention and include peptides comprising amino acid sequences derived from the amino acid sequence of a DROP encoding gene, or the amino acid sequence of a protein homologous to a DROP, which include fewer amino acids than a full length DROP or the full length protein which is homologous to a DROP, and exhibits at least some enzymatic or biological activity of a DROP. Typically, biologically active portions (e.g., peptides which are, for example, 5, 10, 15, 20, 30, 35, 36, 37, 38, 39, 40, 50, 100 or more amino acids in length) comprise a domain or motif with at least one activity of a DROP. Moreover, other biologically active portions in which other regions of the protein are deleted, can be prepared by recombinant techniques and evaluated for one or more of the activities described herein. Preferably, the biologically active portions of a DROP include one or more selected domains/motifs or portions thereof having biological activity.
The term “biological active portion” or “biological activity” means a polypeptide as depicted in table II, column 3 or a portion of said polypeptide which still has at least 10% or 20%, preferably 20%, 30%, 40% or 50%, especially preferably 60%, 70% or 80% of the enzymatic or biological activity of the natural or starting enzyme or protein.

[0197] In the process according to the invention nucleic acid sequences can be used, which, if appropriate, contain synthetic, non-natural or modified nucleotide bases, which can be incorporated into DNA or RNA. Said synthetic, non-natural or modified bases can for example increase the stability of the nucleic acid molecule outside or inside a cell. The nucleic acid molecules of the invention can contain the same modifications as aforementioned.

[0198] As used in the present context the term “nucleic acid molecule” may also encompass the untranslated sequence located at the 3′ and at the 5′ end of the coding gene region, for example at least 500, preferably 200, especially preferably 100, nucleotides of the sequence upstream of the 5′ end of the coding region and at least 100, preferably 50, especially preferably 20, nucleotides of the sequence downstream of the 3′ end of the coding gene region. It is often advantageous only to choose the coding region for cloning and expression purposes.

[0199] Preferably, the nucleic acid molecule used in the process according to the invention or the nucleic acid molecule of the invention is an isolated nucleic acid molecule.

[0200] An “isolated” polynucleotide or nucleic acid molecule is separated from other polynucleotides or nucleic acid molecules, which are present in the natural source of the nucleic acid molecule. An isolated nucleic acid molecule may be a chromosomal fragment of several kb, or preferably, a molecule only comprising the coding region of the gene. Accordingly, an isolated nucleic acid molecule of the invention may comprise chromosomal regions, which are adjacent 5′ and 3′ or further adjacent chromosomal regions, but preferably comprises no such sequences which naturally flank the nucleic acid molecule sequence in the genomic or chromosomal context in the organism from which the nucleic acid molecule originates (for example sequences which are adjacent to the regions encoding the 5′- and 3′-UTRs of the nucleic acid molecule). In various embodiments, the isolated nucleic acid molecule used in the process according to the invention may, for example comprise less than approximately 5 kb, 4 kb, 3 kb, 2 kb, 1 kb, 0.5 kb or 0.1 kb nucleotide sequences which naturally flank the nucleic acid molecule in the genomic DNA of the cell from which the nucleic acid molecule originates.

[0201] The nucleic acid molecules used in the process, for example the polynucleotide of the invention or of a part thereof can be isolated using molecular-biological standard techniques and the sequence information provided herein. Also, for example a homologous sequence or homologous, conserved sequence regions at the DNA or amino acid level can be identified with the aid of comparison algorithms. The former can be used as hybridization probes under standard hybridization techniques (for example those described in Sambrook et al., Molecular Cloning: A Laboratory Manual. 2nd Ed., Cold Spring Harbor Laboratory, Cold Spring Harbor Laboratory Press, Cold Spring Harbor, N.Y., 1989) for isolating further nucleic acid sequences useful in this process.

[0202] A nucleic acid molecule encompassing a complete sequence of the nucleic acid molecules used in the process, for example the polynucleotide of the invention, or a part thereof may additionally be isolated by polymerase chain reaction, oligonucleotide primers based on this sequence or on parts thereof being used. For example, a nucleic acid molecule comprising the complete sequence or part thereof can be isolated by polymerase chain reaction using oligonucleotide primers which have been generated on the basis of this very sequence. For example, mRNA can be isolated from cells (for example by means of the guanidinium thiocyanate extraction method of Chirgwin et al. (1979) Biochemistry 18:5294-5299) and cDNA can be generated by means of reverse transcriptase (for example Moloney MLV reverse transcriptase, available from Gibco/BRL, Bethesda, Md., or AMV reverse transcriptase, obtainable from Seikagaku America, Inc., St. Petersburg, Fla.).

[0203] Synthetic oligonucleotide primers for the amplification, e.g. as shown in table III, column 7, by means of polymerase chain reaction can be generated on the basis of a sequence shown herein, for example the sequence shown in table I, columns 5 and 7 or the sequences derived from table II, columns 5 and 7.

[0204] Moreover, it is possible to identify conserved protein by carrying out protein sequence alignments with the polypeptide encoded by the nucleic acid molecules of the present invention, in particular with the sequences encoded by the nucleic acid molecule shown in, column 5 or 7 of Table I, from which conserved regions, and in turn, degenerate primers can be derived.

Conserved regions are those, which show a very little variation in the amino acid in one particular position of several homologs from different origin. The consenus sequence and polypeptide motifs shown in column 7 of Table IV are derived from said aligments, are represent such conserved protein regions. Moreover, it is possible to identify conserved regions from various organisms by carrying out protein sequence alignments with the polypeptide encoded by the nucleic acid of the present invention, in particular with the sequences encoded by the polypeptide molecule shown in column 5 or 7 of Table II, from which conserved regions, and in turn, degenerate primers can be derived.
In one advantageous embodiment, in the method of the present invention the activity of a polypeptide is increased comprising or consisting of a consensus sequence or a polypeptide motif shown in table IV column 7 and in one another embodiment, the present invention relates to a polypeptide comprising or consisting of a consensus sequence or a polypeptide motif shown in table IV, column 7 whereby 20 or less, preferably 15 or 10, preferably 9, 8, 7, or 6, more preferred 5 or 4, even more preferred 3, even more preferred 2, even more preferred 1, most preferred 0 of the amino acids positions indicated can be replaced by any amino acid. In one embodiment not more than 15%, preferably 10%, even more preferred 5%, 4%, 3%, or 2%, most preferred 1% or 0% of the amino acid position indicated by a letter are/is replaced another amino acid. In one embodiment 20 or less, preferably 15 or 10, preferably 9, 8, 7, or 6, more preferred 5 or 4, even more preferred 3, even more preferred 2, even more preferred 1, most preferred 0 amino acids are inserted into a consensus sequence or protein motif.
The consensus sequence was derived from a multiple alignment of the sequences as listed in table II. The letters represent the one letter amino acid code and indicate that the amino acids are conserved in at least 80% of the aligned proteins, whereas the letter X stands for amino acids, which are not conserved in at least 80% of the aligned sequences. The consensus sequence starts with the first conserved amino acid in the alignment, and ends with the last conserved amino acid in the alignment of the investigated sequences. The number of given X indicates the distances between conserved amino acid residues, e.g. Y-x(21,23)-F means that conserved tyrosine and phenylalanine residues in the alignment are separated from each other by minimum 21 and maximum 23 amino acid residues in the alignment of all investigated sequences.
Conserved domains were identified from all sequences and are described using a subset of the standard Prosite notation, e.g the pattern Y-x(21,23)-[FW] means that a conserved tyrosine is separated by minimum 21 and maximum 23 amino acid residues from either a phenylalanine or tryptophane. Patterns had to match at least 80% of the investigated proteins.
Conserved patterns were identified with the software tool MEME version 3.5.1 or manually. MEME was developed by Timothy L. Bailey and Charles Elkan, Dept. of Computer Science and Engeneering, University of California, San Diego, USA and is described by Timothy L. Bailey and Charles Elkan [Fitting a mixture model by expectation maximization to discover motifs in biopolymers, Proceedings of the Second International Conference on Intelligent Systems for Molecular Biology, pp. 28-36, AAAI Press, Menlo Park, Calif., 1994]. The source code for the stand-alone program is public available from the San Diego Supercomputer center (http://meme.sdsc.edu).
For identifying common motifs in all sequences with the software tool MEME, the following settings were used: -maxsize 500000, -nmotifs 15, -evt 0.001, -maxw 60, -distance 1e-3, -minsites number of sequences used for the analysis. Input sequences for MEME were non-aligned sequences in Fasta format. Other parameters were used in the default settings in this software version.
Prosite patterns for conserved domains were generated with the software tool Pratt version 2.1 or manually. Pratt was developed by Inge Jonassen, Dept. of Informatics, University of Bergen, Norway and is described by Jonassen et al. [I. Jonassen, J. F. Collins and D. G. Higgins, Finding flexible patterns in unaligned protein sequences, Protein Science 4 (1995), pp. 1587-1595; I.Jonassen, Efficient discovery of conserved patterns using a pattern graph, Submitted to CABIOS Febr. 1997]. The source code (ANSI C) for the stand-alone program is public available, e.g. at establisched Bioinformatic centers like EBI (European Bioinformatics Institute).
For generating patterns with the software tool Pratt, following settings were used: PL (max Pattern Length): 100, PN (max Nr of Pattern Symbols): 100, PX (max Nr of consecutive x's): 30, FN (max Nr of flexible spacers): 5, FL (max Flexibility): 30, FP (max Flex.Product): 10, ON (max number patterns): 50. Input sequences for Pratt were distinct regions of the protein sequences exhibiting high similarity as identified from software tool MEME. The minimum number of sequences, which have to match the generated patterns (CM, min Nr of Seqs to Match) was set to at least 80% of the provided sequences. Parameters not mentioned here were used in their default settings.
The Prosite patterns of the conserved domains can be used to search for protein sequences matching this pattern. Various establisched Bioinformatic centers provide public internet portals for using those patterns in database searches (e.g. PIR [Protein Information Resource, located at Georgetown University Medical Center] or ExPASy [Expert Protein Analysis System]). Alternatively, stand-alone software is available, like the program Fuzzpro, which is part of the EMBOSS software package. For example, the program Fuzzpro not only allows to search for an exact pattern-protein match but also allows to set various ambiguities in the performed search.
The alignment was performed with the software ClustalW (version 1.83) and is described by Thompson et al. [Thompson, J. D., Higgins, D. G. and Gibson, T. J. (1994) CLUSTAL W: improving the sensitivity of progressive multiple sequence alignment through sequence weighting, positions-specific gap penalties and weight matrix choice. Nucleic Acids Research, 22:4673-4680]. The source code for the stand-alone program is public available from the European Molecular Biology Laboratory; Heidelberg, Germany. The analysis was performed using the default parameters of ClustalW v1.83 (gap open penalty: 10.0; gap extension penalty: 0.2; protein matrix: Gonnet; pprotein/DNA endgap: −1; protein/DNA gapdist: 4).

[0205] Degenerated primers can then be utilized by PCR for the amplification of fragments of novel proteins having above-mentioned activity, e.g. conferring the increased resistance to plant disease, preferably pathogenic fungi and/or nematodes as compared to a corresponding non-transformed wild type control plant cell, plant or part thereof after increasing the expression or activity or having the activity of a protein as shown in table II, column 3 or further functional homologs of the polypeptide of the invention from other organisms.

[0206] These fragments can then be utilized as hybridization probe for isolating the complete gene sequence. As an alternative, the missing 5′ and 3′ sequences can be isolated by means of RACE-PCR. A nucleic acid molecule according to the invention can be amplified using cDNA or, as an alternative, genomic DNA as template and suitable oligonucleotide primers, following standard PCR amplification techniques. The nucleic acid molecule amplified thus can be cloned into a suitable vector and characterized by means of DNA sequence analysis. Oligonucleotides, which correspond to one of the nucleic acid molecules used in the process can be generated by standard synthesis methods, for example using an automatic DNA synthesizer.

[0207] Nucleic acid molecules which are advantageously for the process according to the invention can be isolated based on their homology to the nucleic acid molecules disclosed herein using the sequences or part thereof as hybridization probe and following standard hybridization techniques under stringent hybridization conditions. In this context, it is possible to use, for example, isolated nucleic acid molecules of at least 15, 20, 25, 30, 35, 40, 50, 60 or more nucleotides, preferably of at least 15, 20 or 25 nucleotides in length which hybridize under stringent conditions with the above-described nucleic acid molecules, in particular with those which encompass a nucleotide sequence of the nucleic acid molecule used in the process of the invention or encoding a protein used in the invention or of the nucleic acid molecule of the invention. Nucleic acid molecules with 30, 50, 100, 250 or more nucleotides may also be used.

[0208] The term “homology” means that the respective nucleic acid molecules or encoded proteins are functionally and/or structurally equivalent. The nucleic acid molecules that are homologous to the nucleic acid molecules described above and that are derivatives of said nucleic acid molecules are, for example, variations of said nucleic acid molecules which represent modifications having the same biological function, in particular encoding proteins with the same or substantially the same biological function. They may be naturally occurring variations, such as sequences from other plant varieties or species, or mutations. These mutations may occur naturally or may be obtained by mutagenesis techniques. The allelic variations may be naturally occurring allelic variants as well as synthetically produced or genetically engineered variants. Structurally equivalents can, for example, be identified by testing the binding of said polypeptide to antibodies or computer based predictions. Structurally equivalent have the similar immunological characteristic, e.g. comprise similar epitopes.

[0209] By “hybridizing” it is meant that such nucleic acid molecules hybridize under conventional hybridization conditions, preferably under stringent conditions such as described by, e.g., Sambrook (Molecular Cloning; A Laboratory Manual, 2nd Edition, Cold Spring Harbor Laboratory Press, Cold Spring Harbor, N.Y. (1989)) or in Current Protocols in Molecular Biology, John Wiley & Sons, N.Y. (1989), 6.3.1-6.3.6.

[0210] According to the invention, DNA as well as RNA molecules of the nucleic acid of the invention can be used as probes. Further, as template for the identification of functional homologues Northern blot assays as well as Southern blot assays can be performed. The Northern blot assay advantageously provides further informations about the expressed gene product: e.g. expression pattern, occurance of processing steps, like splicing and capping, etc. The Southern blot assay provides additional information about the chromosomal localization and organization of the gene encoding the nucleic acid molecule of the invention.

[0211] A preferred, nonlimiting example of stringent hydridization conditions are hybridizations in 6× sodium chloride/sodium citrate (═SSC) at approximately 45° C., followed by one or more wash steps in 0.2×SSC, 0.1% SDS at 50 to 65° C., for example at 50° C., 55° C. or 60° C. The skilled worker knows that these hybridization conditions differ as a function of the type of the nucleic acid and, for example when organic solvents are present, with regard to the temperature and concentration of the buffer. The temperature under “standard hybridization conditions” differs for example as a function of the type of the nucleic acid between 42° C. and 58° C., preferably between 45° C. and 50° C. in an aqueous buffer with a concentration of 0.1×0.5×, 1×, 2×, 3×, 4× or 5×SSC (pH 7.2). If organic solvent(s) is/are present in the abovementioned buffer, for example 50% formamide, the temperature under standard conditions is approximately 40° C., 42° C. or 45° C. The hybridization conditions for DNA:DNA hybrids are preferably for example 0.1×SSC and 20° C., 25° C., 30° C., 35° C., 40° C. or 45° C., preferably between 30° C. and 45° C. The hybridization conditions for DNA:RNA hybrids are preferably for example 0.1×SSC and 30° C., 35° C., 40° C., 45° C., 50° C. or 55° C., preferably between 45° C. and 55° C. The abovementioned hybridization temperatures are determined for example for a nucleic acid approximately 100 by (=base pairs) in length and a G+C content of 50% in the absence of formamide. The skilled worker knows to determine the hybridization conditions required with the aid of textbooks, for example the ones mentioned above, or from the following textbooks: Sambrook et al., “Molecular Cloning”, Cold Spring Harbor Laboratory, 1989; Hames and Higgins (Ed.) 1985, “Nucleic Acids Hybridization: A Practical Approach”, IRL Press at Oxford University Press, Oxford; Brown (Ed.) 1991, “Essential Molecular Biology: A Practical Approach”, IRL Press at Oxford University Press, Oxford.

[0212] A further example of one such stringent hybridization condition is hybridization at 4×SSC at 65° C., followed by a washing in 0.1×SSC at 65° C. for one hour. Alternatively, an exemplary stringent hybridization condition is in 50% formamide, 4×SSC at 42° C. Further, the conditions during the wash step can be selected from the range of conditions delimited by low-stringency conditions (approximately 2×SSC at 50° C.) and high-stringency conditions (approximately 0.2×SSC at 50° C., preferably at 65° C.) (20×SSC: 0.3M sodium citrate, 3M NaCl, pH 7.0). In addition, the temperature during the wash step can be raised from low-stringency conditions at room temperature, approximately 22° C., to higher-stringency conditions at approximately 65° C. Both of the parameters salt concentration and temperature can be varied simultaneously, or else one of the two parameters can be kept constant while only the other is varied. Denaturants, for example formamide or SDS, may also be employed during the hybridization. In the presence of 50% formamide, hybridization is preferably effected at 42° C. Relevant factors like i) length of treatment, ii) salt conditions, iii) detergent conditions, iv) competitor DNAs, v) temperature and vi) probe selection can be combined case by case so that not all possibilities can be mentioned herein.

Thus, in a preferred embodiment, Northern blots are prehybridized with Rothi-Hybri-Quick buffer (Roth, Karlsruhe) at 68° C. for 2 h. Hybridzation with radioactive labelled probe is done overnight at 68° C. Subsequent washing steps are performed at 68° C. with 1×SSC.
For Southern blot assays the membrane is prehybridized with Rothi-Hybri-Quick buffer (Roth, Karlsruhe) at 68° C. for 2 h. The hybridzation with radioactive labelled probe is conducted over night at 68° C. Subsequently the hybridization buffer is discarded and the filter shortly washed using 2×SSC; 0.1% SDS. After discarding the washing buffer new 2×SSC; 0.1% SDS buffer is added and incubated at 68° C. for 15 minutes. This washing step is performed twice followed by an additional washing step using 1×SSC; 0.1% SDS at 68° C. for 10 min.

[0213] Some examples of conditions for DNA hybridization (Southern blot assays) and wash step are shown hereinbelow:
[0214] (1) Hybridization conditions can be selected, for example, from the following conditions:
[0215] a) 4×SSC at 65° C.,
[0216] b) 6×SSC at 45° C.,
[0217] c) 6×SSC, 100 mg/ml denatured fragmented fish sperm DNA at 68° C.,
[0218] d) 6×SSC, 0.5% SDS, 100 mg/ml denatured salmon sperm DNA at 68° C.,
[0219] e) 6×SSC, 0.5% SDS, 100 mg/ml denatured fragmented salmon sperm DNA, 50% formamide at 42° C.,
[0220] f) 50% formamide, 4×SSC at 42° C.,
[0221] g) 50% (vol/vol) formamide, 0.1% bovine serum albumin, 0.1% Ficoll, 0.1% polyvinylpyrrolidone, 50 mM sodium phosphate buffer pH 6.5, 750 mM NaCl, 75 mM sodium citrate at 42° C.,
[0222] h) 2× or 4×SSC at 50° C. (low-stringency condition), or
[0223] i) 30 to 40% formamide, 2× or 4×SSC at 42° C. (low-stringency condition).
[0224] (2) Wash steps can be selected, for example, from the following conditions:
[0225] a) 0.015 M NaCl/0.0015 M sodium citrate/0.1% SDS at 50° C.
[0226] b) 0.1×SSC at 65° C.
[0227] c) 0.1×SSC, 0.5% SDS at 68° C.
[0228] d) 0.1×SSC, 0.5% SDS, 50% formamide at 42° C.
[0229] e) 0.2×SSC, 0.1% SDS at 42° C.
[0230] f) 2×SSC at 65° C. (low-stringency condition).

[0231] Polypeptides having above-mentioned activity, i.e. conferring the increased resistance to plant disease, preferably pathogenic fungi and/or nematodes as compared to a corresponding non-transformed wild type control plant cell, plant or part thereof, derived from other organisms, can be encoded by other DNA sequences which hybridize to the sequences shown in table I, columns 5 and 7 under relaxed hybridization conditions and which code on expression for peptides conferring the increased resistance to plant disease, preferably pathogenic fungi and/or nematodes as compared to a corresponding non-transformed wild type control plant cell, plant or part thereof.

[0232] Further, some applications have to be performed at low stringency hybridisation conditions, without any consequences for the specificity of the hybridisation. For example, a Southern blot analysis of total DNA could be probed with a nucleic acid molecule of the present invention and washed at low stringency (55° C. in 2×SSPE, 0.1% SDS). The hybridisation analysis could reveal a simple pattern of only genes encoding polypeptides of the present invention or used in the process of the invention, e.g. having herein-mentioned activity of increasing the tolerance and/or resistance to environmental stress and the biomass production as compared to a corresponding non-transformed wild type plant cell, plant or part thereof. A further example of such low-stringent hybridization conditions is 4×SSC at 50° C. or hybridization with 30 to 40% formamide at 42° C. Such molecules comprise those which are fragments, analogues or derivatives of the polypeptide of the invention or used in the process of the invention and differ, for example, by way of amino acid and/or nucleotide deletion(s), insertion(s), substitution (s), addition(s) and/or recombination (s) or any other modification(s) known in the art either alone or in combination from the above-described amino acid sequences or their underlying nucleotide sequence(s). However, it is preferred to use high stringency hybridisation conditions.

[0233] Hybridization should advantageously be carried out with fragments of at least 5, 10, 15, 20, 25, 30, 35 or 40 bp, advantageously at least 50, 60, 70 or 80 bp, preferably at least 90, 100 or 110 bp. Most preferably are fragments of at least 15, 20, 25 or 30 bp. Preferably are also hybridizations with at least 100 by or 200, very especially preferably at least 400 by in length. In an especially preferred embodiment, the hybridization should be carried out with the entire nucleic acid sequence with conditions described above.

[0234] The terms “fragment”, “fragment of a sequence” or “part of a sequence” mean a truncated sequence of the original sequence referred to. The truncated sequence (nucleic acid or protein sequence) can vary widely in length; the minimum size being a sequence of sufficient size to provide a sequence with at least a comparable function and/or activity of the original sequence referred to or hybidizing with the nucleic acid molecule of the invention or used in the process of the invention under stringend conditions, while the maximum size is not critical. In some applications, the maximum size usually is not substantially greater than that required to provide the desired activity and/or function(s) of the original sequence.

[0235] Typically, the truncated amino acid sequence will range from about 5 to about 310 amino acids in length. More typically, however, the sequence will be a maximum of about 250 amino acids in length, preferably a maximum of about 200 or 100 amino acids. It is usually desirable to select sequences of at least about 10, 12 or 15 amino acids, up to a maximum of about 20 or 25 amino acids.

[0236] The term “epitope” relates to specific immunoreactive sites within an antigen, also known as antigenic determinates. These epitopes can be a linear array of monomers in a polymeric composition—such as amino acids in a protein—or consist of or comprise a more complex secondary or tertiary structure. Those of skill will recognize that immunogens (i.e., substances capable of eliciting an immune response) are antigens; however, some antigen, such as haptens, are not immunogens but may be made immunogenic by coupling to a carrier molecule. The term “antigen” includes references to a substance to which an antibody can be generated and/or to which the antibody is specifically immunoreactive.

[0237] In one embodiment the present invention relates to a epitope of the polypeptide of the present invention or used in the process of the present invention and confers an increased resistance to plant disease, preferably pathogenic fungi and/or nematodes as compared to a corresponding non-transformed wild type control plant cell, plant or part thereof.

[0238] The term “one or several amino acids” relates to at least one amino acid but not more than that number of amino acids, which would result in a homology of below 50% identity. Preferably, the identity is more than 70% or 80%, more preferred are 85%, 90%, 91%, 92%, 93%, 94% or 95%, even more preferred are 96%, 97%, 98%, or 99% identity.

[0239] Further, the nucleic acid molecule of the invention comprises a nucleic acid molecule, which is a complement of one of the nucleotide sequences of above mentioned nucleic acid molecules or a portion thereof. A nucleic acid molecule which is complementary to one of the nucleotide sequences shown in table I, columns 5 and 7 is one which is sufficiently complementary to one of the nucleotide sequences shown in table I, columns 5 and 7 such that it can hybridize to one of the nucleotide sequences shown in table I, columns 5 and 7, thereby forming a stable duplex. Preferably, the hybridisation is performed under stringent hybrization conditions. However, a complement of one of the herein disclosed sequences is preferably a sequence complement thereto according to the base pairing of nucleic acid molecules well known to the skilled person. For example, the bases A and G undergo base pairing with the bases T and U or C, resp. and visa versa. Modifications of the bases can influence the base-pairing partner.

[0240] The nucleic acid molecule of the invention comprises a nucleotide sequence which is at least about 30%, 35%, 40% or 45%, preferably at least about 50%, 55%, 60% or 65%, more preferably at least about 70%, 80%, or 90%, and even more preferably at least about 95%, 97%, 98%, 99% or more homologous to a nucleotide sequence shown in table I, columns 5 and 7, or a portion thereof and preferably has above mentioned activity, in particular having a tolerance and/or resistance to environmental stress and biomass production increasing activity after increasing the acitivity or an activity of a gene product as shown in table II, column 3 by for example expression either in the cytsol or in an organelle such as a plastid or mitochondria or both, preferably in plastids.

[0241] The nucleic acid molecule of the invention comprises a nucleotide sequence which hybridizes, preferably hybridizes under stringent conditions as defined herein, to one of the nucleotide sequences shown in table I, columns 5 and 7, or a portion thereof and encodes a protein having above-mentioned activity, e.g. conferring an increased resistance to plant disease, preferably pathogenic fungi and/or nematodes as compared to a corresponding non-transformed wild type control plant cell, plant or part thereof by for example expression either in the cytsol or in an organelle such as a plastid or mitochondria or both, preferably in plastids.

[0242] Moreover, the nucleic acid molecule of the invention can comprise only a portion of the coding region of one of the sequences shown in table I, columns 5 and 7, for example a fragment which can be used as a probe or primer or a fragment encoding a biologically active portion of the polypeptide of the present invention or of a polypeptide used in the process of the present invention, i.e. having above-mentioned activity, e.g. conferring an increase of the tolerance and/or resistance to environmental stress and biomass production as compared to a corresponding non-transformed wild type plant cell, plant or part thereof if its activity is increased by for example expression either in the cytsol or in an organelle such as a plastid or mitochondria or both, preferably in plastids. The nucleotide sequences determined from the cloning of the present protein-according-to-the-invention-encoding gene allows for the generation of probes and primers designed for use in identifying and/or cloning its homologues in other cell types and organisms. The probe/primer typically comprises substantially purified oligonucleotide. The oligonucleotide typically comprises a region of nucleotide sequence that hybridizes under stringent conditions to at least about 12, 15 preferably about 20 or 25, more preferably about 40, 50 or 75 consecutive nucleotides of a sense strand of one of the sequences set forth, e.g., in table I, columns 5 and 7, an anti-sense sequence of one of the sequences, e.g., set forth in table I, columns 5 and 7, or naturally occurring mutants thereof. Primers based on a nucleotide of invention can be used in PCR reactions to clone homologues of the polypeptide of the invention or of the polypeptide used in the process of the invention, e.g. as the primers described in the examples of the present invention, e.g. as shown in the examples. A PCR with the primers shown in table III, column 7 will result in a fragment of the gene product as shown in table II, column 3.

[0243] Primer sets are interchangable. The person skilled in the art knows to combine said primers to result in the desired product, e.g. in a full length clone or a partial sequence. Probes based on the sequences of the nucleic acid molecule of the invention or used in the process of the present invention can be used to detect transcripts or genomic sequences encoding the same or homologous proteins. The probe can further comprise a label group attached thereto, e.g. the label group can be a radioisotope, a fluorescent compound, an enzyme, or an enzyme co-factor. Such probes can be used as a part of a genomic marker test kit for identifying cells which express an polypepetide of the invention or used in the process of the present invention, such as by measuring a level of an encoding nucleic acid molecule in a sample of cells, e.g., detecting mRNA levels or determining, whether a genomic gene comprising the sequence of the polynucleotide of the invention or used in the processs of the present invention has been mutated or deleted.

[0244] The nucleic acid molecule of the invention encodes a polypeptide or portion thereof which includes an amino acid sequence which is sufficiently homologous to the amino acid sequence shown in table II, columns 5 and 7 such that the protein or portion thereof maintains the ability to participate in the increase of tolerance and/or resistance to environmental stress and increase of biomass production as compared to a corresponding non-transformed wild type plant cell, plant or part thereof, in particular increasing the activity as mentioned above or as described in the examples in plants is comprised.

[0245] As used herein, the language “sufficiently homologous” refers to proteins or portions thereof which have amino acid sequences which include a minimum number of identical or equivalent amino acid residues (e.g., an amino acid residue which has a similar side chain as an amino acid residue in one of the sequences of the polypeptide of the present invention) to an amino acid sequence shown in table II, columns 5 and 7 such that the protein or portion thereof is able to participate in the increase of the increase of tolerance and/or resistance to stress, the increased resistance to plant disease, preferably pathogenic fungi and/or nematodes as compared to a corresponding non-transformed wild type plant cell, plant or part thereof. For examples having the activity of a protein as shown in table II, column 3 and as described herein.

[0246] In one embodiment, the nucleic acid molecule of the present invention comprises a nucleic acid that encodes a portion of the protein of the present invention. The protein is at least about 30%, 35%, 40%, 45% or 50%, preferably at least about 55%, 60%, 65% or 70%, and more preferably at least about 75%, 80%, 85%, 90%, 91%, 92%, 93% or 94% and most preferably at least about 95%, 97%, 98%, 99% or more homologous to an entire amino acid sequence of table II, columns 5 and 7 and having above-mentioned activity, e.g. conferring an increased resistance to plant disease, preferably pathogenic fungi and/or nematodes as compared to a corresponding non-transformed wild type control plant cell, plant or part thereof by for example expression either in the cytsol or in an organelle such as a plastid or mitochondria or both, preferably in plastids.

[0247] Portions of proteins encoded by the nucleic acid molecule of the invention are preferably biologically active, preferably having above-mentioned annotated activity, e.g. conferring an increase in tolerance and/or resistance to stress, the increased resistance to plant disease, preferably pathogenic fungi and/or nematodes as as compared to a corresponding non-transformed wild type plant cell, plant or part thereof after increase of activity.

[0248] As mentioned herein, the term “biologically active portion” is intended to include a portion, e.g., a domain/motif, that confers increase in tolerance and/or resistance to environmental stress and increase in biomass production as compared to a corresponding non-transformed wild type plant cell, plant or part thereof or has an immunological activity such that it is binds to an antibody binding specifially to the polypeptide of the present invention or a polypeptide used in the process of the present invention for increased resistance to plant disease, preferably pathogenic fungi and/or nematodes as compared to a corresponding non-transformed wild type control plant cell, plant or part thereof.

[0249] The invention further relates to nucleic acid molecules that differ from one of the nucleotide sequences shown in table I A, columns 5 and 7 (and portions thereof) due to degeneracy of the genetic code and thus encode a polypeptide of the present invention, in particular a polypeptide having above mentioned activity, e.g. as that polypeptides depicted by the sequence shown in table II, columns 5 and 7 or the functional homologues. Advantageously, the nucleic acid molecule of the invention comprises, or in an other embodiment has, a nucleotide sequence encoding a protein comprising, or in an other embodiment having, an amino acid sequence shown in table II, columns 5 and 7 or the functional homologues. In a still further embodiment, the nucleic acid molecule of the invention encodes a full length protein which is substantially homologous to an amino acid sequence shown in table II, columns 5 and 7 or the functional homologues. However, in a preferred embodiment, the nucleic acid molecule of the present invention does not consist of the sequence shown in table I, preferably table IA, columns 5 and 7.

[0250] In addition, it will be appreciated by those skilled in the art that DNA sequence polymorphisms that lead to changes in the amino acid sequences may exist within a population. Such genetic polymorphism in the gene encoding the polypeptide of the invention or comprising the nucleic acid molecule of the invention may exist among individuals within a population due to natural variation.

[0251] As used herein, the terms “gene” and “recombinant gene” refer to nucleic acid molecules comprising an open reading frame encoding the polypeptide of the invention or comprising the nucleic acid molecule of the invention or encoding the polypeptide used in the process of the present invention, preferably from a crop plant or from a microorgansim useful for the method of the invention. Such natural variations can typically result in 1-5% variance in the nucleotide sequence of the gene. Any and all such nucleotide variations and resulting amino acid polymorphisms in genes encoding a polypeptide of the invention or comprising a the nucleic acid molecule of the invention that are the result of natural variation and that do not alter the functional activity as described are intended to be within the scope of the invention.

[0252] Nucleic acid molecules corresponding to natural variants homologues of a nucleic acid molecule of the invention, which can also be a cDNA, can be isolated based on their homology to the nucleic acid molecules disclosed herein using the nucleic acid molecule of the invention, or a portion thereof, as a hybridization probe according to standard hybridization techniques under stringent hybridization conditions.

[0253] Accordingly, in another embodiment, a nucleic acid molecule of the invention is at least 15, 20, 25 or 30 nucleotides in length. Preferably, it hybridizes under stringent conditions to a nucleic acid molecule comprising a nucleotide sequence of the nucleic acid molecule of the present invention or used in the process of the present invention, e.g. comprising the sequence shown in table I, columns 5 and 7. The nucleic acid molecule is preferably at least 20, 30, 50, 100, 250 or more nucleotides in length.

[0254] The term “hybridizes under stringent conditions” is defined above. In one embodiment, the term “hybridizes under stringent conditions” is intended to describe conditions for hybridization and washing under which nucleotide sequences at least 30%, 40%, 50% or 65% identical to each other typically remain hybridized to each other. Preferably, the conditions are such that sequences at least about 70%, more preferably at least about 75% or 80%, and even more preferably at least about 85%, 90% or 95% or more identical to each other typically remain hybridized to each other.

[0255] Preferably, nucleic acid molecule of the invention that hybridizes under stringent conditions to a sequence shown in table I, columns 5 and 7 corresponds to a naturally-occurring nucleic acid molecule of the invention. As used herein, a “naturally-occurring” nucleic acid molecule refers to an RNA or DNA molecule having a nucleotide sequence that occurs in nature (e.g., encodes a natural protein). Preferably, the nucleic acid molecule encodes a natural protein having above-mentioned activity, e.g. conferring the tolerance and/or resistance to environmental stress and biomass production increase after increasing the expression or activity thereof or the activity of a protein of the invention or used in the process of the invention by for example expression the nucleic acid sequence of the gene product in the cytsol and/or in an organelle such as a plastid or mitochondria, preferably in plastids.

[0256] In addition to naturally-occurring variants of the sequences of the polypeptide or nucleic acid molecule of the invention as well as of the polypeptide or nucleic acid molecule used in the process of the invention that may exist in the population, the skilled artisan will further appreciate that changes can be introduced by mutation into a nucleotide sequence of the nucleic acid molecule encoding the polypeptide of the invention or used in the process of the present invention, thereby leading to changes in the amino acid sequence of the encoded said polypeptide, without altering the functional ability of the polypeptide, preferably not decreasing said activity.

[0257] For example, nucleotide substitutions leading to amino acid substitutions at “non-essential” amino acid residues can be made in a sequence of the nucleic acid molecule of the invention or used in the process of the invention, e.g. shown in table I, columns 5 and 7.

[0258] A “non-essential” amino acid residue is a residue that can be altered from the wild-type sequence of one without altering the activity of said polypeptide, whereas an “essential” amino acid residue is required for an activity as mentioned above, e.g. leading to an increase in the tolerance and/or resistance to environmental stress and biomass production as compared to a corresponding non-transformed wild type plant cell, plant or part thereof in an organism after an increase of activity of the polypeptide. Other amino acid residues, however, (e.g., those that are not conserved or only semi-conserved in the domain having said activity) may not be essential for activity and thus are likely to be amenable to alteration without altering said activity.

[0259] Further, a person skilled in the art knows that the codon usage between organisms can differ. Therefore, he may adapt the codon usage in the nucleic acid molecule of the present invention to the usage of the organism or the cell compartment for example of the plastid or mitochondria in which the polynucleotide or polypeptide is expressed.

[0260] Accordingly, the invention relates to nucleic acid molecules encoding a polypeptide having above-mentioned activity, in an organisms or parts thereof by for example expression either in the cytsol or in an organelle such as a plastid or mitochondria or both, preferably in plastids that contain changes in amino acid residues that are not essential for said activity. Such polypeptides differ in amino acid sequence from a sequence contained in the sequences shown in table II, columns 5 and 7 yet retain said activity described herein. The nucleic acid molecule can comprise a nucleotide sequence encoding a polypeptide, wherein the polypeptide comprises an amino acid sequence at least about 50% identical to an amino acid sequence shown in table II, columns 5 and 7 and is capable of participation in the increased yield under condition of transient and repetitive abiotic stress production as compared to a corresponding non-transformed wild type plant cell, plant or part thereof after increasing its activity, e.g. its expression by for example expression either in the cytsol or in an organelle such as a plastid or mitochondria or both, preferably in plastids. Preferably, the protein encoded by the nucleic acid molecule is at least about 60% identical to the sequence shown in table II, columns 5 and 7, more preferably at least about 70% identical to one of the sequences shown in table II, columns 5 and 7, even more preferably at least about 80%, 90%, 95% homologous to the sequence shown in table II, columns 5 and 7, and most preferably at least about 96%, 97%, 98%, or 99% identical to the sequence shown in table II, columns 5 and 7.

[0261] To determine the percentage homology (=identity, herein used interchangeably) of two amino acid sequences or of two nucleic acid molecules, the sequences are written one underneath the other for an optimal comparison (for example gaps may be inserted into the sequence of a protein or of a nucleic acid in order to generate an optimal alignment with the other protein or the other nucleic acid).

[0262] The amino acid residues or nucleic acid molecules at the corresponding amino acid positions or nucleotide positions are then compared. If a position in one sequence is occupied by the same amino acid residue or the same nucleic acid molecule as the corresponding position in the other sequence, the molecules are homologous at this position (i.e. amino acid or nucleic acid “homology” as used in the present context corresponds to amino acid or nucleic acid “identity”. The percentage homology between the two sequences is a function of the number of identical positions shared by the sequences (i.e. % homology=number of identical positions/total number of positions×100). The terms “homology” and “identity” are thus to be considered as synonyms.

[0263] For the determination of the percentage homology (=identity) of two or more amino acids or of two or more nucleotide sequences several computer software programs have been developed. The homology of two or more sequences can be calculated with for example the software fasta, which presently has been used in the version fasta 3 (W. R. Pearson and D. J. Lipman (1988), Improved Tools for Biological Sequence Comparison. PNAS 85:2444-2448; W. R. Pearson (1990) Rapid and Sensitive Sequence Comparison with FASTP and FASTA, Methods in Enzymology 183:63-98; W. R. Pearson and D. J. Lipman (1988) Improved Tools for Biological Sequence Comparison. PNAS 85:2444-2448; W. R. Pearson (1990); Rapid and Sensitive Sequence Comparison with FASTP and FASTAMethods in Enzymology 183:63-98). Another useful program for the calculation of homologies of different sequences is the standard blast program, which is included in the Biomax pedant software (Biomax, Munich, Federal Republic of Germany). This leads unfortunately sometimes to suboptimal results since blast does not always include complete sequences of the subject and the querry. Nevertheless as this program is very efficient it can be used for the comparison of a huge number of sequences. The following settings are typically used for such a comparisons of sequences: -p Program Name [String]; -d Database [String]; default=nr; -i Query File [File In]; default=stdin; -e Expectation value (E) [Real]; default=10.0; -m alignment view options: 0=pairwise; 1=query-anchored showing identities; 2=query-anchored no identities; 3=flat query-anchored, show identities; 4=flat query-anchored, no identities; 5=query-anchored no identities and blunt ends; 6=flat query-anchored, no identities and blunt ends; 7=XML Blast output; 8=tabular; 9 tabular with comment lines [Integer]; default=0; -o BLAST report Output File [File Out] Optional; default=stdout; -F Filter query sequence (DUST with blastn, SEG with others) [String]; default=T; -G Cost to open a gap (zero invokes default behavior) [Integer]; default=O; -E Cost to extend a gap (zero invokes default behavior) [Integer]; default=0; -X X dropoff value for gapped alignment (in bits) (zero invokes default behavior); blastn 30, megablast 20, tblastx 0, all others 15 [Integer]; default=0; -I Show GI's in deflines [T/F]; default=F; -q Penalty for a nucleotide mismatch (blastn only) [Integer]; default=−3; -r Reward for a nucleotide match (blastn only) [Integer]; default=1; -v Number of database sequences to show one-line descriptions for (V) [Integer]; default=500; -b Number of database sequence to show alignments for (B) [Integer]; default=250; -f Threshold for extending hits, default if zero; blastp 11, blastn 0, blastx 12, tblastn 13; tblastx 13, megablast 0 [Integer]; default=0; -g Perfom gapped alignment (not available with tblastx) [T/F]; default=T; -Q Query Genetic code to use [Integer]; default=1; -D DB Genetic code (for tblast[nx] only) [Integer]; default=1; -a Number of processors to use [Integer]; default=1; -O SeqAlign file [File Out] Optional; -J Believe the query defline [T/F]; default=F; -M Matrix [String]; default=BLOSUM62; -W Word size, default if zero (blastn 11, megablast 28, all others 3) [Integer]; default=0; -z Effective length of the database (use zero for the real size) [Real]; default=0; -K Number of best hits from a region to keep (off by default, if used a value of 100 is recommended) [Integer]; default=0; -P 0 for multiple hit, 1 for single hit [Integer]; default=0; -Y Effective length of the search space (use zero for the real size) [Real]; default=0; -S Query strands to search against database (for blast[nx], and tblastx); 3 is both, 1 is top, 2 is bottom [Integer]; default=3; -T Produce HTML output [T/F]; default=F; -I Restrict search of database to list of GI's [String] Optional; -U Use lower case filtering of FASTA sequence [T/F] Optional; default=F; -y X dropoff value for ungapped extensions in bits (0.0 invokes default behavior); blastn 20, megablast 10, all others 7 [Real]; default=0.0; -Z X dropoff value for final gapped alignment in bits (0.0 invokes default behavior); blastn/megablast 50, tblastx 0, all others 25 [Integer]; default=0; -R PSI-TBLASTN checkpoint file [File In] Optional; -n MegaBlast search [T/F]; default=F; -L Location on query sequence [String] Optional; -A Multiple Hits window size, default if zero (blastn/megablast 0, all others 40 [Integer]; default=0; -w Frame shift penalty (OOF algorithm for blastx) [Integer]; default=0; -t Length of the largest intron allowed in tblastn for linking HSPs (0 disables linking) [Integer]; default=0.

[0264] Results of high quality are reached by using the algorithm of Needleman and Wunsch or Smith and Waterman. Therefore programs based on said algorithms are preferred. Advantageously the comparisons of sequences can be done with the program PileUp (J. Mol. Evolution., 25, 351 (1987), Higgins et al., CABIOS 5, 151 (1989)) or preferably with the programs “Gap” and “Needle”, which are both based on the algorithms of Needleman and Wunsch (J. Mol. Biol. 48; 443 (1970)), and “BestFit”, which is based on the algorithm of Smith and Waterman (Adv. Appl. Math. 2; 482 (1981)). “Gap” and “BestFit” are part of the GCG software-package (Genetics Computer Group, 575 Science Drive, Madison, Wis., USA 53711 (1991); Altschul et al., (Nucleic Acids Res. 25, 3389 (1997)), “Needle” is part of the The European Molecular Biology Open Software Suite (EMBOSS) (Trends in Genetics 16 (6), 276 (2000)). Therefore preferably the calculations to determine the percentages of sequence homology are done with the programs “Gap” or “Needle” over the whole range of the sequences. The following standard adjustments for the comparison of nucleic acid sequences were used for “Needle”: matrix: EDNAFULL, Gap_penalty: 10.0, Extend_penalty: 0.5. The following standard adjustments for the comparison of nucleic acid sequences were used for “Gap”: gap weight: 50, length weight: 3, average match: 10.000, average mismatch: 0.000.

[0265] For example a sequence, which has 80% homology with sequence SEQ ID NO: 9 at the nucleic acid level is understood as meaning a sequence which, upon comparison with the sequence SEQ ID NO: 9 by the above program “Needle” with the above parameter set, has a 80% identity.

[0266] Homology between two polypeptides is understood as meaning the identity of the amino acid sequence over in each case the entire sequence length which is calculated by comparison with the aid of the above program “Needle” using Matrix: EBLOSUM62, Gap_penalty: 8.0, Extend_penalty: 2.0.

[0267] For example a sequence which has a 80% homology with sequence SEQ ID NO: 10 at the protein level is understood as meaning a sequence which, upon comparison with the sequence SEQ ID NO: 10 by the above program “Needle” with the above parameter set, has a 80% identity.

[0268] Functional equivalents derived from one of the polypeptides as shown in table II, columns 5 and 7 according to the invention by substitution, insertion or deletion have at least 30%, 35%, 40%, 45% or 50%, preferably at least 55%, 60%, 65% or 70% by preference at least 80%, especially preferably at least 85% or 90%, 91%, 92%, 93% or 94%, very especially preferably at least 95%, 97%, 98% or 99% homology with one of the polypeptides as shown in table II, columns 5 and 7 according to the invention and are distinguished by essentially the same properties as the polypeptide as shown in table II, columns 5 and 7.

[0269] Functional equivalents derived from the nucleic acid sequence as shown in table I, columns 5 and 7 according to the invention by substitution, insertion or deletion have at least 30%, 35%, 40%, 45% or 50%, preferably at least 55%, 60%, 65% or 70% by preference at least 80%, especially preferably at least 85% or 90%, 91%, 92%, 93% or 94%, very especially preferably at least 95%, 97%, 98% or 99% homology with one of the polypeptides as shown in table II, columns 5 and 7 according to the invention and encode polypeptides having essentially the same properties as the polypeptide as shown in table II, columns 5 and 7.

[0270] “Essentially the same properties” of a functional equivalent is above all understood as meaning that the functional equivalen has above mentioned acitivty, by for example expression either in the cytsol or in an organelle such as a plastid or mitochondria or both, preferably in plastids while increasing the amount of protein, activity or function of said functional equivalent in an organism, e.g. a microorgansim, a plant or plant or animal tissue, plant or animal cells or a part of the same.

[0271] A nucleic acid molecule encoding an homologous to a protein sequence of table II, columns 5 and 7 can be created by introducing one or more nucleotide substitutions, additions or deletions into a nucleotide sequence of the nucleic acid molecule of the present invention, in particular of table I, columns 5 and 7 such that one or more amino acid substitutions, additions or deletions are introduced into the encoded protein. Mutations can be introduced into the encoding sequences of table I, columns 5 and 7 by standard techniques, such as site-directed mutagenesis and PCR-mediated mutagenesis.

[0272] Preferably, conservative amino acid substitutions are made at one or more predicted non-essential amino acid residues. A “conservative amino acid substitution” is one in which the amino acid residue is replaced with an amino acid residue having a similar side chain. Families of amino acid residues having similar side chains have been defined in the art. These families include amino acids with basic side chains (e.g., lysine, arginine, histidine), acidic side chains (e.g., aspartic acid, glutamic acid), uncharged polar side chains (e.g., glycine, asparagine, glutamine, serine, threonine, tyrosine, cysteine), nonpolar side chains (e.g., alanine, valine, leucine, isoleucine, proline, phenylalanine, methionine, tryptophane), beta-branched side chains (e.g., threonine, valine, isoleucine) and aromatic side chains (e.g., tyrosine, phenylalanine, tryptophane, histidine).

[0273] Thus, a predicted nonessential amino acid residue in a polypeptide of the invention or a polypeptide used in the process of the invention is preferably replaced with another amino acid residue from the same family. Alternatively, in another embodiment, mutations can be introduced randomly along all or part of a coding sequence of a nucleic acid molecule of the invention or used in the process of the invention, such as by saturation mutagenesis, and the resultant mutants can be screened for activity described herein to identify mutants that retain or even have increased above mentioned activity, e.g. conferring an increased resistance to plant disease, preferably pathogenic fungi and/or nematodes as compared to a corresponding non-transformed wild type control plant cell, plant or part thereof.

[0274] Following mutagenesis of one of the sequences of shown herein, the encoded protein can be expressed recombinantly and the activity of the protein can be determined using, for example, assays described herein (see Examples).

[0275] A high homology of the nucleic acid molecule used in the process according to the invention can be found for database entries by Gap search.

[0276] Homologues of the nucleic acid sequences used, with the sequence shown in table I, columns 5 and 7, comprise also allelic variants with at least approximately 30%, 35%, 40% or 45% homology, by preference at least approximately 50%, 60% or 70%, more preferably at least approximately 90%, 91%, 92%, 93%, 94% or 95% and even more preferably at least approximately 96%, 97%, 98%, 99% or more homology with one of the nucleotide sequences shown or the abovementioned derived nucleic acid sequences or their homologues, derivatives or analogues or parts of these. Allelic variants encompass in particular functional variants which can be obtained by deletion, insertion or substitution of nucleotides from the sequences shown, preferably from table I, columns 5 and 7, or from the derived nucleic acid sequences, the intention being, however, that the enzyme activity or the biological activity of the resulting proteins synthesized is advantageously retained or increased.

[0277] In one embodiment of the present invention, the nucleic acid molecule of the invention or used in the process of the invention comprises the sequences shown in any of the table I, columns 5 and 7. It is preferred that the nucleic acid molecule comprises as little as possible other nucleotides not shown in any one of table I, columns 5 and 7. In one embodiment, the nucleic acid molecule comprises less than 500, 400, 300, 200, 100, 90, 80, 70, 60, 50 or 40 further nucleotides. In a further embodiment, the nucleic acid molecule comprises less than 30, 20 or 10 further nucleotides. In one embodiment, the nucleic acid molecule use in the process of the invention is identical to the sequences shown in table I, columns 5 and 7.

[0278] Also preferred is that the nucleic acid molecule used in the process of the invention encodes a polypeptide comprising the sequence shown in table II, columns 5 and 7. In one embodiment, the nucleic acid molecule encodes less than 150, 130, 100, 80, 60, 50, 40 or 30 further amino acids. In a further embodiment, the encoded polypeptide comprises less than 20, 15, 10, 9, 8, 7, 6 or 5 further amino acids. In one embodiment used in the inventive process, the encoded polypeptide is identical to the sequences shown in table II, columns 5 and 7.

[0279] In one embodiment, the nucleic acid molecule of the invention or used in the process encodes a polypeptide comprising the sequence shown in table II, columns 5 and 7 comprises less than 100 further nucleotides. In a further embodiment, said nucleic acid molecule comprises less than 30 further nucleotides. In one embodiment, the nucleic acid molecule used in the process is identical to a coding sequence of the sequences shown in table I, columns 5 and 7.

[0280] Polypeptides (=proteins), which still have the essential biological or enzymatic activity of the polypeptide of the present invention conferring an increased yield under condition of transient and repetitive abiotic stress production as compared to a corresponding non-transformed wild type plant cell, plant or part thereof i.e. whose activity is essentially not reduced, are polypeptides with at least 10% or 20%, by preference 30% or 40%, especially preferably 50% or 60%, very especially preferably 80% or 90 or more of the wild type biological activity or enzyme activity, advantageously, the activity is essentially not reduced in comparison with the activity of a polypeptide shown in table II, columns 5 and 7 expressed under identical conditions.

[0281] Homologues of table I, columns 5 and 7 or of the derived sequences of table II, columns 5 and 7 also mean truncated sequences, cDNA, single-stranded DNA or RNA of the coding and noncoding DNA sequence. Homologues of said sequences are also understood as meaning derivatives, which comprise noncoding regions such as, for example, UTRs, terminators, enhancers or promoter variants. The promoters upstream of the nucleotide sequences stated can be modified by one or more nucleotide substitution(s), insertion(s) and/or deletion(s) without, however, interfering with the functionality or activity either of the promoters, the open reading frame (=ORF) or with the 3′-regulatory region such as terminators or other 3′ regulatory regions, which are far away from the ORF. It is furthermore possible that the activity of the promoters is increased by modification of their sequence, or that they are replaced completely by more active promoters, even promoters from heterologous organisms. Appropriate promoters are known to the person skilled in the art and are mentioned herein below.

[0282] In addition to the nucleic acid molecules encoding the DROP described above, another aspect of the invention pertains to negative regulators of the activity of a nucleic acid molecules selected from the group according to table I, column 5 and/or 7, preferably column 7. Antisense polynucleotides thereto are thought to inhibit the downregulating activity of those negative regulatorsby specifically binding the target polynucleotide and interfering with transcription, splicing, transport, translation, and/or stability of the target polynucleotide. Methods are described in the prior art for targeting the antisense polynucleotide to the chromosomal DNA, to a primary RNA transcript, or to a processed mRNA. Preferably, the target regions include splice sites, translation initiation codons, translation termination codons, and other sequences within the open reading frame.

[0283] The term “antisense,” for the purposes of the invention, refers to a nucleic acid comprising a polynucleotide that is sufficiently complementary to all or a portion of a gene, primary transcript, or processed mRNA, so as to interfere with expression of the endogenous gene. “Complementary” polynucleotides are those that are capable of base pairing according to the standard Watson-Crick complementarity rules. bpecifically, purines will base pair with pyrimidines to form a combination of guanine paired with cytosine (G:C) and adenine paired with either thymine (A:T) in the case of DNA, or adenine paired with uracil (A:U) in the case of RNA. It is understood that two polynucleotides may hybridize to each other even if they are not completely complementary to each other, provided that each has at least one region that is substantially complementary to the other. The term “antisense nucleic acid” includes single stranded RNA as well as double-stranded DNA expression cassettes that can be transcribed to produce an antisense RNA. “Active” antisense nucleic acids are antisense RNA molecules that are capable of selectively hybridizing with a negative regulator of the activity of a nucleic acid molecules encoding a polypeptide having at least 80% sequence identity with the polypeptide selected from the group according to table II, column 5 and/or 7, preferably column 7.

The antisense nucleic acid can be complementary to an entire negative regulator strand, or to only a portion thereof. In an embodiment, the antisense nucleic acid molecule is antisense to a “noncoding region” of the coding strand of a nucleotide sequence encoding a DROP. The term “noncoding region” refers to 5′ and 3′ sequences that flank the coding region that are not translated into amino acids (i.e., also referred to as 5′ and 3′ untranslated regions). The antisense nucleic acid molecule can be complementary to only a portion of the noncoding region of DROP mRNA. For example, the antisense oligonucleotide can be complementary to the region surrounding the translation start site of DROP mRNA. An antisense oligonucleotide can be, for example, about 5, 10, 15, 20, 25, 30, 35, 40, 45 or 50 nucleotides in length. Typically, the antisense molecules of the present invention comprise an RNA having 60-100% sequence identity with at least 14 consecutive nucleotides of a noncoding region of one of the nucleic acid of table I. Preferably, the sequence identity will be at least 70%, more preferably at least 75%, 80%, 85%, 90%, 95%, 98% and most preferably 99%.
An antisense nucleic acid of the invention can be constructed using chemical synthesis and enzymatic ligation reactions using procedures known in the art. For example, an antisense nucleic acid (e.g., an antisense oligonucleotide) can be chemically synthesized using naturally occurring nucleotides or variously modified nucleotides designed to increase the biological stability of the molecules or to increase the physical stability of the duplex formed between the antisense and sense nucleic acids, e.g., phosphorothioate derivatives and acridine substituted nucleotides can be used. Examples of modified nucleotides which can be used to generate the antisense nucleic acid include 5-fluorouracil, 5-bromouracil, 5-chlorouracil, 5-iodouracil, hypoxanthine, xanthine, 4-acetylcytosine, 5-(carboxyhydroxylmethyl)uracil, 5-carboxymethylaminomethyl-2-thiouridine, 5-carboxymethylaminomethyluracil, dihydrouracil, beta-D-galactosylqueosine, inosine, N6-isopentenyladenine, 1-methylguanine, 1-methylinosine, 2,2-dimethylguanine, 2-methyladenine, 2-methylguanine, 3-methylcytosine, 5-methylcytosine, N6-adenine, 7-methylguanine, 5-methylaminomethyluracil, 5-methoxyaminomethyl-2-thiouracil, beta-D-mannosylqueosine, 5′-methoxycarboxymethyluracil, 5-methoxyuracil, 2-methylthio-N6-isopentenyladenine, uracil-5-oxyacetic acid (v), wybutoxosine, pseudouracil, queosine, 2-thiocytosine, 5-methyl-2-thiouracil, 2-thiouracil, 4-thiouracil, 5-methyluracil, uracil-5-oxyacetic acid methylester, uracil-5-oxyacetic acid (v), 5-methyl-2-thiouracil, 3-(3-amino-3-N-2-carboxypropyl) uracil, (acp3)w, and 2,6-diaminopurine. Alternatively, the antisense nucleic acid can be produced biologically using an expression vector into which a nucleic acid has been subcloned in an antisense orientation (i.e., RNA transcribed from the inserted nucleic acid will be of an antisense orientation to a target nucleic acid of interest, described further in the following subsection).

[0284] In yet another embodiment, the antisense nucleic acid molecule of the invention is an alpha-anomeric nucleic acid molecule. An alpha-anomeric nucleic acid molecule forms specific double-stranded hybrids with complementary RNA in which, contrary to the usual b-units, the strands run parallel to each other (Gaultier et al., 1987, Nucleic Acids. Res. 15:6625-6641). The antisense nucleic acid molecule can also comprise a 2′-o-methylribonucleotide (Inoue et al., 1987, Nucleic Acids Res. 15:6131-6148) or a chimeric RNA-DNA analogue (Inoue et al., 1987, FEBS Lett. 215:327-330).

[0285] The antisense nucleic acid molecules of the invention are typically administered to a cell or generated in situ such that they hybridize with or bind to cellular mRNA and/or genomic DNA. The hybridization can be by conventional nucleotide complementarity to form a stable duplex, or, for example, in the case of an antisense nucleic acid molecule which binds to DNA duplexes, through specific interactions in the major groove of the double helix. The antisense molecule can be modified such that it specifically binds to a receptor or an antigen expressed on a selected cell surface, e.g., by linking the antisense nucleic acid molecule to a peptide or an antibody which binds to a cell surface receptor or antigen. The antisense nucleic acid molecule can also be delivered to cells using the vectors described herein. To achieve sufficient intracellular concentrations of the antisense molecules, vector constructs in which the antisense nucleic acid molecule is placed under the control of a strong prokaryotic, viral, or eukaryotic (including plant) promoter are preferred.

[0286] As an alternative to antisense polynucleotides, ribozymes, sense polynucleotides, or double stranded RNA (dsRNA) can be used to reduce expression of a DROP polypeptide. By “ribozyme” is meant a catalytic RNA-based enzyme with ribonuclease activity which is capable of cleaving a single-stranded nucleic acid, such as an mRNA, to which it has a complementary region. Ribozymes (e.g., hammerhead ribozymes described in Haselhoff and Gerlach, 1988, Nature 334:585-591) can be used to catalytically cleave DROP mRNA transcripts to thereby inhibit translation of DROP mRNA. A ribozyme having specificity for a DROP-encoding nucleic acid can be designed based upon the nucleotide sequence of a DROP cDNA, as disclosed herein or on the basis of a heterologous sequence to be isolated according to methods taught in this invention. For example, a derivative of a Tetrahymena L-19 IVS RNA can be constructed in which the nucleotide sequence of the active site is complementary to the nucleotide sequence to be cleaved in a DROP-encoding mRNA. See, e.g., U.S. Pat. Nos. 4,987,071 and 5,116,742 to Cech et al. Alternatively, DROP mRNA can be used to select a catalytic RNA having a specific ribonuclease activity from a pool of RNA molecules. See, e.g., Bartel, D. and Szostak, J. W., 1993, Science 261:1411-1418. In preferred embodiments, the ribozyme will contain a portion having at least 7, 8, 9, 10, 12, 14, 16, 18 or 20 nucleotides, and more preferably 7 or 8 nucleotides, that have 100% complementarity to a portion of the target RNA. Methods for making ribozymes are known to those skilled in the art. See, e.g., U.S. Pat. Nos. 6,025,167; 5,773,260; and 5,496,698. The term “dsRNA,” as used herein, refers to RNA hybrids comprising two strands of RNA. The dsRNAs can be linear or circular in structure. In a preferred embodiment, dsRNA is specific for a polynucleotide encoding either the polypeptide according to table II or a polypeptide having at least 70% sequence identity with a polypeptide according to table II. The hybridizing RNAs may be substantially or completely complementary. By “substantially complementary,” is meant that when the two hybridizing RNAs are optimally aligned using the BLAST program as described above, the hybridizing portions are at least 95% complementary. Preferably, the dsRNA will be at least 100 base pairs in length. Typically, the hybridizing RNAs will be of identical length with no over hanging 5′ or 3′ ends and no gaps. However, dsRNAs having 5′ or 3′ overhangs of up to 100 nucleotides may be used in the methods of the invention.

The dsRNA may comprise ribonucleotides or ribonucleotide analogs, such as 2′-O-methyl ribosyl residues, or combinations thereof. See, e.g., U.S. Pat. Nos. 4,130,641 and 4,024,222. A dsRNA polyriboinosinic acid:polyribocytidylic acid is described in U.S. Pat. No. 4,283,393. Methods for making and using dsRNA are known in the art. One method comprises the simultaneous transcription of two complementary DNA strands, either in vivo, or in a single in vitro reaction mixture. See, e.g., U.S. Pat. No. 5,795,715. In one embodiment, dsRNA can be introduced into a plant or plant cell directly by standard transformation procedures. Alternatively, dsRNA can be expressed in a plant cell by transcribing two complementary RNAs.

[0287] Other methods for the inhibition of endogenous gene expression, such as triple helix formation (Moser et al., 1987, Science 238:645-650 and Cooney et al., 1988, Science 241:456-459) and cosuppression (Napoli et al., 1990, The Plant Cell 2:279-289) are known in the art. Partial and full-length cDNAs have been used for the cosuppression of endogenous plant genes. See, e.g., U.S. Pat. Nos. 4,801,340, 5,034,323, 5,231,020, and 5,283,184; Van der Kroll et al., 1990, The Plant Cell 2:291-299; Smith et al., 1990, Mol. Gen. Genetics 224:477-481 and Napoli et al., 1990, The Plant Cell 2:279-289.

For sense suppression, it is believed that introduction of a sense polynucleotide blocks transcription of the corresponding target gene. The sense polynucleotide will have at least 65% sequence identity with the target plant gene or RNA. Preferably, the percent identity is at least 80%, 90%, 95% or more. The introduced sense polynucleotide need not be full length relative to the target gene or transcript. Preferably, the sense polynucleotide will have at least 65% sequence identity with at least 100 consecutive nucleotides of one of the nucleic acids as depicted in Table I. The regions of identity can comprise introns and/or exons and untranslated regions. The introduced sense polynucleotide may be present in the plant cell transiently, or may be stably integrated into a plant chromosome or extrachromosomal replicon.

[0288] Further, object of the invention is an expression vector comprising a nucleic acid molecule comprising a nucleic acid molecule selected from the group consisting of:
[0289] a) a nucleic acid molecule encoding the polypeptide shown in column 5 or 7 of Table II;
[0290] b) a nucleic acid molecule shown in column 5 or 7 of Table I;
[0291] c) a nucleic acid molecule, which, as a result of the degeneracy of the genetic code, can be derived from a polypeptide sequence depicted in column 5 or 7 of Table II and confers an increased resistance to plant disease, preferably pathogenic fungi and/or nematodes as compared to a corresponding non-transformed wild type control plant cell, a plant or a part thereof;
[0292] d) a nucleic acid molecule having at least 30% identity with the nucleic acid molecule sequence of a polynucleotide comprising the nucleic acid molecule shown in column 5 or 7 of Table I and confers an increased resistance to plant disease, preferably pathogenic fungi and/or nematodes as compared to a corresponding non-transformed wild type control plant cell, a plant or a part thereof;
[0293] e) a nucleic acid molecule encoding a polypeptide having at least 30% identity with the amino acid sequence of the polypeptide encoded by the nucleic acid molecule of (a) to (c) and having the activity represented by a polypeptide comprising a polypeptide as depicted in column 5 of Table I and confers an increased resistance to plant disease, preferably pathogenic fungi and/or nematodes as compared to a corresponding non-transformed wild type control plant cell, a plant or a part thereof;
[0294] f) nucleic acid molecule which hybridizes with a nucleic acid molecule of (a) to (c) under stringent hybridization conditions and confers an increased resistance to plant disease, preferably pathogenic fungi and/or nematodes as compared to a corresponding non-transformed wild type control plant cell, a plant or a part thereof;
[0295] g) a nucleic acid molecule encoding a polypeptide which can be isolated with the aid of monoclonal or polyclonal antibodies made against a polypeptide encoded by one of the nucleic acid molecules of (a) to (e) and having the activity represented by the nucleic acid molecule comprising a polynucleotide as depicted in column 5 of Table I;
[0296] h) a nucleic acid molecule encoding a polypeptide comprising the consensus sequence or one or more polypeptide motifs as shown in column 7 of Table IV and preferably having the activity represented by polypeptide comprising a polypeptide as depicted in column 5 of Table II or IV;
[0297] h) a nucleic acid molecule encoding a polypeptide having the activity represented by a protein as depicted in column 5 of Table II and confers an increased resistance to plant disease, preferably pathogenic fungi and/or nematodes as compared to a corresponding non-transformed wild type control plant cell, a plant or a part thereof;
[0298] i) nucleic acid molecule which comprises a polynucleotide, which is obtained by amplifying a cDNA library or a genomic library using the primers in column 7 of Table III and preferably having the activity represented by a polypetide comprising a polypeptide as depicted in column 5 of Table II or IV;
[0299] and
[0300] j) a nucleic acid molecule which is obtainable by screening a suitable nucleic acid library under stringent hybridization conditions with a probe comprising a complementary sequence of a nucleic acid molecule of (a) or (b) or with a fragment thereof, having at least 15 nt, preferably 20 nt, 30 nt, 50 nt, 100 nt, 200 nt or 500 nt of a nucleic acid molecule complementary to a nucleic acid molecule sequence characterized in (a) to (e) and encoding a polypeptide having the activity represented by a protein comprising a polypeptide as depicted in column 5 of Table II,
   whereby the nucleic acid molecule according to (a) to (j) is at least in one or more nucleotides, preferably different from the sequence depicted in column 5 or 7 of Table I A and preferably which encodes a protein which preferably differs at least in one or more amino acids from the protein sequences depicted in column 5 or 7 of Table II A.

[0301] The invention further provides an isolated recombinant expression vector comprising a stress related protein encoding nucleic acid as described above, wherein expression of the vector or stress related protein encoding nucleic acid, respectively in a host cell results in increased tolerance and/or resistance to stress, preferably plant disease, preferably caused by pathogenic fungi and/or nematodes as compared to the corresponding non-transformed wild type of the host cell. As used herein, the term “vector” refers to a nucleic acid molecule capable of transporting another nucleic acid to which it has been linked. One type of vector is a “plasmid”, which refers to a circular double stranded DNA loop into which additional DNA segments can be ligated. Another type of vector is a viral vector, wherein additional DNA segments can be ligated into the viral genome. Further types of vectors can be linearized nucleic acid sequences, such as transposons, which are pieces of DNA which can copy and insert themselves. There have been 2 types of transposons found: simple transposons, known as Insertion Sequences and composite transposons, which can have several genes as well as the genes that are required for transposition.

Certain vectors are capable of autonomous replication in a host cell into which they are introduced (e.g., bacterial vectors having a bacterial origin of replication and episomal mammalian vectors). Other vectors (e.g., non-episomal mammalian vectors) are integrated into the genome of a host cell upon introduction into the host cell, and thereby are replicated along with the host genome. Moreover, certain vectors are capable of directing the expression of genes to which they are operatively linked. Such vectors are referred to herein as “expression vectors”. In general, expression vectors of utility in recombinant DNA techniques are often in the form of plasmids. In the present specification, “plasmid” and “vector” can be used interchangeably as the plasmid is the most commonly used form of vector. However, the invention is intended to include such other forms of expression vectors, such as viral vectors (e.g., replication defective retroviruses, adenoviruses and adeno-associated viruses), which serve equivalent functions.

[0302] A plant expression cassette preferably contains regulatory sequences capable of driving gene expression in plant cells and operably linked so that each sequence can fulfill its function, for example, termination of transcription by polyadenylation signals. Preferred polyadenylation signals are those originating from Agrobacterium tumefaciens T-DNA such as the gene 3 known as octopine synthase of the Ti-plasmid pTiACH5 (Gielen et al., 1984 EMBO J. 3:835) or functional equivalents thereof but also all other terminators functionally active in plants are suitable.

As plant gene expression is very often not limited on transcriptional levels, a plant expression cassette preferably contains other operably linked sequences like translational enhancers such as the overdrive-sequence containing the 5″-untranslated leader sequence from tobacco mosaic virus enhancing the protein per RNA ratio (Gallie et al., 1987 Nucl. Acids Research 15:8693-8711).

[0303] Plant gene expression has to be operably linked to an appropriate promoter conferring gene expression in a timely, cell or tissue specific manner. Preferred are promoters driving constitutive expression (Benfey et al., 1989 EMBO J. 8:2195-2202) like those derived from plant viruses like the 35S CaMV (Franck et al., 1980 Cell 21:285-294), the 19S CaMV (see also U.S. Pat. No. 5,352,605 and PCT Application No. WO 8402913) or plant promoters like those from Rubisco small subunit described in U.S. Pat. No. 4,962,028.

[0304] Additional advantageous regulatory sequences are, for example, included in the plant promoters such as CaMV/35S [Franck et al., Cell 21 (1980) 285-294], PRP1 [Ward et al., Plant. Mol. Biol. 22 (1993)], SSU, OCS, lib4, usp, STLS1, B33, LEB4, nos or in the ubiquitin, napin or phaseolin promoter. Also advantageous in this connection are inducible promoters such as the promoters described in EP-A-0 388 186 (benzyl sulfonamide inducible), Plant J. 2, 1992: 397-404 (Gatz et al., Tetracyclin inducible), EP-A-0 335 528 (abscisic acid inducible) or WO 93/21334 (ethanol or cyclohexenol inducible). Additional useful plant promoters are the cytosolic FBPase promotor or ST-LSI promoter of the potato (Stockhaus et al., EMBO J. 8, 1989, 2445), the phosphorybosyl phyrophoshate amido transferase promoter of Glycine max (gene bank accession No. U87999) or the noden specific promoter described in EP-A-0 249 676. Additional particularly advantageous promoters are seed specific promoters which can be used for monokotyledones or dikotyledones and are described in U.S. Pat. No. 5,608,152 (napin promoter from rapeseed), WO 98/45461 (phaseolin promoter from Arobidopsis), U.S. Pat. No. 5,504,200 (phaseolin promoter from Phaseolus vulgaris), WO 91/13980 (Bce4 promoter from Brassica) and Baeumlein et al., Plant J., 2, 2, 1992: 233-239 (LEB4 promoter from leguminosa). Said promoters are useful in dikotyledones. The following promoters are useful for example in monokotyledones Ipt-2- or Ipt-1-promoter from barley (WO 95/15389 and WO 95/23230) or hordein promoter from barley. Other useful promoters are described in WO 99/16890.

It is possible in principle to use all natural promoters with their regulatory sequences like those mentioned above for the novel process. It is also possible and advantageous in addition to use synthetic promoters.

[0305] The gene construct may also comprise further genes which are to be inserted into the organisms and which are for example involved in stress resistance and biomass production increase. These genes can be heterologous or homologous in origin. The inserted genes may have their own promoter or else be under the control of same promoter as the sequences of the nucleic acid of table I or their homologs.

The gene construct advantageously comprises, for expression of the other genes present, additionally 3′ and/or 5′ terminal regulatory sequences to enhance expression, which are selected for optimal expression depending on the selected host organism and gene or genes.

[0306] These regulatory sequences are intended to make specific expression of the genes and protein expression possible as mentioned above. This may mean, depending on the host organism, for example that the gene is expressed or overexpressed only after induction, or that it is immediately expressed and/or overexpressed.

The regulatory sequences or factors may moreover preferably have a beneficial effect on expression of the introduced genes, and thus increase it. It is possible in this way for the regulatory elements to be enhanced advantageously at the transcription level by using strong transcription signals such as promoters and/or enhancers. However, in addition, it is also possible to enhance translation by, for example, improving the stability of the mRNA.

[0307] Other preferred sequences for use in plant gene expression cassettes are targeting-sequences necessary to direct the gene product in its appropriate cell compartment (for review see Kermode, 1996 Crit. Rev. Plant Sci. 15(4):285-423 and references cited therein) such as the vacuole, the nucleus, all types of plastids like amyloplasts, chloroplasts, chromoplasts, the extracellular space, mitochondria, the endoplasmic reticulum, oil bodies, peroxisomes and other compartments of plant cells.

Plant gene expression can also be facilitated via an inducible promoter (for review see Gatz, 1997 Annu. Rev. Plant Physiol. Plant Mol. Biol. 48:89-108). Chemically inducible promoters are especially suitable if gene expression is wanted to occur in a time specific manner.

[0308] Table 1 lists several examples of promoters that may be used to regulate transcription of the stress related protein nucleic acid coding sequences.

TABLE 1
Examples of tissue-specific and stress-inducible promoters in plants

| Expression | Reference |
|---|---|
| Cor78- Cold, drought, salt, | Ishitani, et al., Plant Cell 9: 1935-1949 |
| ABA, wounding-inducible | (1997). Yamaguchi-Shinozaki and |
| | Shinozaki, Plant Cell 6: 251-264 (1994). |
| Rci2A - Cold, dehydration- | Capel et al., Plant Physiol 115: 569-576 |
| inducible | (1997) |
| Rd22 - Drought, salt | Yamaguchi-Shinozaki and Shinozaki, Mol |
| | Gen Genet 238: 17-25 (1993). |
| Cor15A - Cold, dehydration, | Baker et al., Plant Mol. Biol. 24: |
| ABA | 701-713 (1994). |
| GH3- Auxin inducible | Liu et al., Plant Cell 6: 645-657 (1994) |
| ARSK1-Root, salt inducible | Hwang and Goodman, Plant J 8: 37-43 |
| | (1995). |
| Expression | Reference |
| PtxA - Root, salt inducible | GenBank accession X67427 |
| SbHRGPS - Root specific | Ahn et al., Plant Cell 8: 1477-1490 |
| | (1998). |
| KST1 - Guard cell specific | Plesch et al., Plant Journal. 28(4): |
| | 455-64, (2001) |
| KAT1 - Guard cell specific | Plesch et al., Gene 249: 83-89 (2000) |
| | Nakamura et al., Plant Physiol. 109: |
| | 371-374 (1995) |
| salicylic acid inducible | PCT Application No. WO 95/19443 |
| tetracycline inducible | Gatz et al. Plant J. 2: 397-404 (1992) |
| Ethanol inducible | PCT Application No. WO 93/21334 |
| pathogen inducible PRP1 | Ward et al., 1993 Plant. Mol. Biol. 22: |
| | 361-366 |
| heat inducible hsp80 | U.S. Pat. No. 5,187,267 |
| cold inducible alpha-amylase | PCT Application No. WO 96/12814 |
| Wound-inducible pinII | European Patent No. 375091 |
| RD29A - salt-inducible | Yamaguchi-Shinozalei et al. (1993) Mol. |
| | Gen. Genet. 236: 331-340 |
| plastid-specific viral RNA- | PCT Application No. WO 95/16783 and. |
| polymerase | WO 97/06250 |

[0309] Other promotors, e.g. superpromotor (Ni et al., Plant Journal 7, 1995: 661-676), Ubiquitin promotor (Callis et al., J. Biol. Chem., 1990, 265: 12486-12493; U.S. Pat. No. 5,510,474; U.S. Pat. No. 6,020,190; Kawalleck et al., Plant. Molecular Biology, 1993, 21: 673-684) or 34S promotor (GenBank Accession numbers M59930 and X16673) were similar useful for the present invention and are known to a person skilled in the art.

Developmental stage-preferred promoters are preferentially expressed at certain stages of development. Tissue and organ preferred promoters include those that are preferentially expressed in certain tissues or organs, such as leaves, roots, seeds, or xylem. Examples of tissue preferred and organ preferred promoters include, but are not limited to fruit-preferred, ovule-preferred, male tissue-preferred, seed-preferred, integument-preferred, tuber-preferred, stalk-preferred, pericarp-preferred, and leaf-preferred, stigma-preferred, pollen-preferred, anther-preferred, a petal-preferred, sepal-preferred, pedicel-preferred, silique-preferred, stem-preferred, root-preferred promoters, and the like. Seed preferred promoters are preferentially expressed during seed development and/or germination. For example, seed preferred promoters can be embryo-preferred, endosperm preferred, and seed coat-preferred. See Thompson et al., 1989, BioEssays 10:108. Examples of seed preferred promoters include, but are not limited to, cellulose synthase (celA), Cim1, gamma-zein, globulin-1, maize 19 kD zein (cZ19B1), and the like.
Other promoters useful in the expression cassettes of the invention include, but are not limited to, the major chlorophyll a/b binding protein promoter, histone promoters, the Ap3 promoter, the β-conglycin promoter, the napin promoter, the soybean lectin promoter, the maize 15 kD zein promoter, the 22 kD zein promoter, the 27 kD zein promoter, the g-zein promoter, the waxy, shrunken 1, shrunken 2 and bronze promoters, the Zm13 promoter (U.S. Pat. No. 5,086,169), the maize polygalacturonase promoters (PG) (U.S. Pat. Nos. 5,412,085 and 5,545,546), and the SGB6 promoter (U.S. Pat. No. 5,470,359), as well as synthetic or other natural promoters.

[0310] Additional flexibility in controlling heterologous gene expression in plants may be obtained by using DNA binding domains and response elements from heterologous sources (i.e., DNA binding domains from non-plant sources). An example of such a heterologous DNA binding domain is the LexA DNA binding domain (Brent and Ptashne, 1985, Cell 43:729-736).

[0311] The invention further provides a recombinant expression vector comprising a DRCP DNA molecule of the invention cloned into the expression vector in an antisense orientation. That is, the DNA molecule is operatively linked to a regulatory sequence in a manner that allows for expression (by transcription of the DNA molecule) of an RNA molecule that is antisense to a DRCP mRNA. Regulatory sequences operatively linked to a nucleic acid molecule cloned in the antisense orientation can be chosen which direct the continuous expression of the antisense RNA molecule in a variety of cell types. For instance, viral promoters and/or enhancers, or regulatory sequences can be chosen which direct constitutive, tissue specific, or cell type specific expression of antisense RNA. The antisense expression vector can be in the form of a recombinant plasmid, phagemid, or attenuated virus wherein antisense nucleic acids are produced under the control of a high efficiency regulatory region. The activity of the regulatory region can be determined by the cell type into which the vector is introduced. For a discussion of the regulation of gene expression using antisense genes, see Weintraub, H. et al., 1986, Antisense RNA as a molecular tool for genetic analysis, Reviews—Trends in Genetics, Vol. 1(1), and Mol et al., 1990, FEBS Letters 268:427-430.

[0312] Another aspect of the invention pertains to isolated DRCP, and biologically active portions thereof. An “isolated” or “purified” polypeptide or biologically active portion thereof is free of some of the cellular material when produced by recombinant DNA techniques, or chemical precursors or other chemicals when chemically synthesized. The language “substantially free of cellular material” includes preparations of DROP in which the polypeptide is separated from some of the cellular components of the cells in which it is naturally or recombinantly produced. In one embodiment, the language “substantially free of cellular material” includes preparations of a DROP having less than about 30% (by dry weight) of non-DROP material (also referred to herein as a “contaminating polypeptide”), more preferably less than about 20% of non-DROP material, still more preferably less than about 10% of non-DROP material, and most preferably less than about 5% non-DROP material.

[0313] When the DROP or biologically active portion thereof is recombinantly produced, it is also preferably substantially free of culture medium, i.e., culture medium represents less than about 20%, more preferably less than about 10%, and most preferably less than about 5% of the volume of the polypeptide preparation. The language “substantially free of chemical precursors or other chemicals” includes preparations of DROP in which the polypeptide is separated from chemical precursors or other chemicals that are involved in the synthesis of the polypeptide. In one embodiment, the language “substantially free of chemical precursors or other chemicals” includes preparations of a DROP having less than about 30% (by dry weight) of chemical precursors or non-DROP chemicals, more preferably less than about 20% chemical precursors or non-DROP chemicals, still more preferably less than about 10% chemical precursors or non-DROP chemicals, and most preferably less than about 5% chemical precursors or non-DROP chemicals. In preferred embodiments, isolated polypeptides, or biologically active portions thereof, lack contaminating polypeptides from the same organism from which the DROP is derived. Typically, such polypeptides are produced by recombinant expression of, for example, a Saccharomyces cerevisiae, E. coli or Brassica napus, Glycine max, Zea mays or Oryza sativa DROP in plants other than Saccharomyces cerevisiae, E. coli, or microorganisms such as C. glutamicum, ciliates, algae or fungi.

[0314] The nucleic acid molecules, polypeptides, polypeptide homologs, fusion polypeptides, primers, vectors, and host cells described herein can be used in one or more of the following methods: identification of Saccharomyces cerevisiae, E. coli or Brassica napus, Glycine max, Zea mays or Oryza sativa and related organisms; mapping of genomes of organisms related to Saccharomyces cerevisiae, E. coli; identification and localization of Saccharomyces cerevisiae, E. coli or Brassica napus, Glycine max, Zea mays or Oryza sativa sequences of interest; evolutionary studies; determination of DROP regions required for function; modulation of a DROP activity; modulation of the metabolism of one or more cell functions; modulation of the transmembrane transport of one or more compounds; modulation of stress resistance; and modulation of expression of DROP nucleic acids.

[0315] The DROP nucleic acid molecules of the invention are also useful for evolutionary and polypeptide structural studies. The metabolic and transport processes in which the molecules of the invention participate are utilized by a wide variety of prokaryotic and eukaryotic cells; by comparing the sequences of the nucleic acid molecules of the present invention to those encoding similar enzymes from other organisms, the evolutionary relatedness of the organisms can be assessed. Similarly, such a comparison permits an assessment of which regions of the sequence are conserved and which are not, which may aid in determining those regions of the polypeptide that are essential for the functioning of the enzyme. This type of determination is of value for polypeptide engineering studies and may give an indication of what the polypeptide can tolerate in terms of mutagenesis without losing function.

[0316] Manipulation of the DROP nucleic acid molecules of the invention may result in the production of DROP having functional differences from the wild-type DROP. These polypeptides may be improved in efficiency or activity, may be present in greater numbers in the cell than is usual, or may be decreased in efficiency or activity.

There are a number of mechanisms by which the alteration of a DROP of the invention may directly affect stress response and/or stress tolerance. In the case of plants expressing DROP, increased transport can lead to improved salt and/or solute partitioning within the plant tissue and organs. By either increasing the number or the activity of transporter molecules which exportionic molecules from the cell, it may be possible to affect the salt and cold tolerance of the cell.

[0317] The effect of the genetic modification in plants, on stress tolerance can be assessed by growing the modified plant under less than suitable conditions and then analyzing the growth characteristics and/or metabolism of the plant. Such analysis techniques are well known to one skilled in the art, and include dry weight, wet weight, polypeptide synthesis, carbohydrate synthesis, lipid synthesis, evapotranspiration rates, general plant and/or crop yield, flowering, reproduction, seed setting, root growth, respiration rates, photosynthesis rates, etc. (Applications of HPLC in Biochemistry in: Laboratory Techniques in Biochemistry and Molecular Biology, vol. 17; Rehm et al., 1993 Biotechnology, vol. 3, Chapter III: Product recovery and purification, page 469-714, VCH: Weinheim; Better, P. A. et al., 1988, Bioseparations: downstream processing for biotechnology, John Wiley and Sons; Kennedy, J. F. and Cabral, J. M. S., 1992, Recovery processes for biological materials, John Wiley and Sons; Shaeiwitz, J. A. and Henry, J. D., 1988, Biochemical separations, in: Ulmann's Encyclopedia of Industrial Chemistry, vol. B3, Chapter 11, page 1-27, VCH: Weinheim; and Dechow, F.J., 1989, Separation and purification techniques in biotechnology, Noyes Publications).

For example, yeast expression vectors comprising the nucleic acids disclosed herein, or fragments thereof, can be constructed and transformed into Saccharomyces cerevisiae using standard protocols. The resulting transgenic cells can then be assayed for fail or alteration of their tolerance to biotic stress, preferably caused by plant disease, preferably by pathogenic fungi and/or nematodes or drought, salt, and cold stress. Similarly, plant expression vectors comprising the nucleic acids disclosed herein, or fragments thereof, can be constructed and transformed into an appropriate plant cell such as Arabidopsis, soy, rape, maize, cotton, rice, wheat, Medicago truncatula, etc., using standard protocols. The resulting transgenic cells and/or plants derived therefrom can then be assayed for fail or alteration of their tolerance to biotic stress, preferably caused by plant disease, preferably by pathogenic fungi and/or nematodes or drought, salt, cold stress.

[0318] The engineering of one or more genes according to table I and coding for the DROP of table II of the invention may also result in DROP having altered activities which indirectly impact the stress response and/or stress tolerance of algae, plants, ciliates, or fungi, or other microorganisms like C. glutamicum.

[0319] Additionally, the sequences disclosed herein, or fragments thereof, can be used to generate knockout mutations in the genomes of various organisms, such as bacteria, mammalian cells, yeast cells, and plant cells (Girke, T., 1998, The Plant Journal 15:39-48). The resultant knockout cells can then be evaluated for their ability or capacity to tolerate various stress conditions, their response to various stress conditions, and the effect on the phenotype and/or genotype of the mutation. For other methods of gene inactivation, see U.S. Pat. No. 6,004,804 “Non-Chimeric Mutational Vectors” and Puttaraju et al., 1999, Spliceosome-mediated RNA trans-splicing as a tool for gene therapy, Nature Biotechnology 17:246-252.

The aforementioned mutagenesis strategies for DROP resulting in increased stress resistance are not meant to be limiting; variations on these strategies will be readily apparent to one skilled in the art. Using such strategies, and incorporating the mechanisms disclosed herein, the nucleic acid and polypeptide molecules of the invention may be utilized to generate algae, ciliates, plants, fungi, or other microorganisms like C. glutamicum expressing mutated DROP nucleic acid and polypeptide molecules such that the stress tolerance is improved.

[0320] The present invention also provides antibodies that specifically bind to a DROP, or a portion thereof, as encoded by a nucleic acid described herein. Antibodies can be made by many well-known methods (See, e.g. Harlow and Lane, “Antibodies; A Laboratory Manual,” Cold Spring Harbor Laboratory, Cold Spring Harbor, N.Y., (1988)). Briefly, purified antigen can be injected into an animal in an amount and in intervals sufficient to elicit an immune response. Antibodies can either be purified directly, or spleen cells can be obtained from the animal. The cells can then fused with an immortal cell line and screened for antibody secretion. The antibodies can be used to screen nucleic acid clone libraries for cells secreting the antigen. Those positive clones can then be sequenced. See, for example, Kelly et al., 1992, Bio/Technology 10:163-167; Bebbington et al., 1992, Bio/Technology 10:169-175.

The phrases “selectively binds” and “specifically binds” with the polypeptide refer to a binding reaction that is determinative of the presence of the polypeptide in a heterogeneous population of polypeptides and other biologics. Thus, under designated immunoassay conditions, the specified antibodies bound to a particular polypeptide do not bind in a significant amount to other polypeptides present in the sample. Selective binding of an antibody under such conditions may require an antibody that is selected for its specificity for a particular polypeptide. A variety of immunoassay formats may be used to select antibodies that selectively bind with a particular polypeptide. For example, solid-phase ELISA immunoassays are routinely used to select antibodies selectively immunoreactive with a polypeptide. See Harlow and Lane, “Antibodies, A Laboratory Manual,” Cold Spring Harbor Publications, New York, (1988), for a description of immunoassay formats and conditions that could be used to determine selective binding.
In some instances, it is desirable to prepare monoclonal antibodies from various hosts. A description of techniques for preparing such monoclonal antibodies may be found in Stites et al., eds., “Basic and Clinical Immunology,” (Lange Medical Publications, Los Altos, Calif., Fourth Edition) and references cited therein, and in Harlow and Lane, “Antibodies, A Laboratory Manual,” Cold Spring Harbor Publications, New York, (1988).

[0321] Gene expression in plants is regulated by the interaction of protein transcription factors with specific nucleotide sequences within the regulatory region of a gene. One example of transcription factors are polypeptides that contain zinc finger (ZF) motifs. Each ZF module is approximately 30 amino acids long folded around a zinc ion. The DNA recognition domain of a ZF protein is a α-helical structure that inserts into the major grove of the DNA double helix. The module contains three amino acids that bind to the DNA with each amino acid contacting a single base pair in the target DNA sequence. ZF motifs are arranged in a modular repeating fashion to form a set of fingers that recognize a contiguous DNA sequence. For example, a three-fingered ZF motif will recognize 9 by of DNA. Hundreds of proteins have been shown to contain ZF motifs with between 2 and 37 ZF modules in each protein (Isalan M, et al., 1998 Biochemistry 37(35):12026-33; Moore M, et al., 2001 Proc. Natl. Acad. Sci. USA 98(4):1432-1436 and 1437-1441; U.S. Pat. No. 6,007,988 and U.S. Pat. No. 6,013,453).

The regulatory region of a plant gene contains many short DNA sequences (cis-acting elements) that serve as recognition domains for transcription factors, including ZF proteins. Similar recognition domains in different genes allow the coordinate expression of several genes encoding enzymes in a metabolic pathway by common transcription factors. Variation in the recognition domains among members of a gene family facilitates differences in gene expression within the same gene family, for example, among tissues and stages of development and in response to environmental conditions.
Typical ZF proteins contain not only a DNA recognition domain but also a functional domain that enables the ZF protein to activate or repress transcription of a specific gene. Experimentally, an activation domain has been used to activate transcription of the target gene (U.S. Pat. No. 5,789,538 and patent application WO9519431), but it is also possible to link a transcription repressor domain to the ZF and thereby inhibit transcription (patent applications WO00/47754 and WO2001002019). It has been reported that an enzymatic function such as nucleic acid cleavage can be linked to the ZF (patent application WO00/20622)

[0322] The invention provides a method that allows one skilled in the art to isolate the regulatory region of one or more stress related protein encoding genes from the genome of a plant cell and to design zinc finger transcription factors linked to a functional domain that will interact with the regulatory region of the gene. The interaction of the zinc finger protein with the plant gene can be designed in such a manner as to alter expression of the gene and preferably thereby to confer increased yield under condition of transient and repetitive abiotic stress.

[0323] In particular, the invention provides a method of producing a transgenic plant with a stress related protein coding nucleic acid, wherein expression of the nucleic acid(s) in the plant results in increased tolerance to environmental stress as compared to a wild type plant comprising: (a) transforming a plant cell with an expression vector comprising a stress related protein encoding nucleic acid, and (b) generating from the plant cell a transgenic plant with an increased tolerance to environmental stress as compared to a wild type plant. For such plant transformation, binary vectors such as pBinAR can be used (Hofgen and Willmitzer, 1990 Plant Science 66:221-230). Moreover suitable binary vectors are for example pBIN19, pB1101, pGPTV or pPZP (Hajukiewicz, P. et al., 1994, Plant Mol. Biol., 25: 989-994).

Construction of the binary vectors can be performed by ligation of the cDNA into the T-DNA. 5′ to the cDNA a plant promoter activates transcription of the cDNA. A polyadenylation sequence is located 3′ to the cDNA. Tissue-specific expression can be achieved by using a tissue specific promoter as listed above. Also, any other promoter element can be used. For constitutive expression within the whole plant, the CaMV 35S promoter can be used. The expressed protein can be targeted to a cellular compartment using a signal peptide, for example for plastids, mitochondria or endoplasmic reticulum (Kermode, 1996 Crit. Rev. Plant Sci. 4(15):285-423). The signal peptide is cloned 5′ in frame to the cDNA to archive subcellular localization of the fusion protein. Additionally, promoters that are responsive to abiotic stresses can be used with, such as the Arabidopsis promoter RD29A. One skilled in the art will recognize that the promoter used should be operatively linked to the nucleic acid such that the promoter causes transcription of the nucleic acid which results in the synthesis of a mRNA which encodes a polypeptide.

[0324] Alternate methods of transfection include the direct transfer of DNA into developing flowers via electroporation or Agrobacterium mediated gene transfer. Agrobacterium mediated plant transformation can be performed using for example the GV3101(pMP90) (Koncz and Schell, 1986 Mol. Gen. Genet. 204:383-396) or LBA4404 (Ooms et al., Plasmid, 1982, 7: 15-29; Hoekema et al., Nature, 1983, 303: 179-180) Agrobacterium tumefaciens strain. Transformation can be performed by standard transformation and regeneration techniques (Deblaere et al., 1994 Nucl. Acids. Res. 13:4777-4788; Gelvin and Schilperoort, Plant Molecular Biology Manual, 2nd Ed.—Dordrecht: Kluwer Academic Publ., 1995.—in Sect., Ringbuc Zentrale Signatur: BT11-P ISBN 0-7923-2731-4; Glick, B R and Thompson, J E, Methods in Plant Molecular Biology and Biotechnology, Boca Raton: CRC Press, 1993.-360 S., ISBN 0-8493-5164-2). For example, rapeseed can be transformed via cotyledon or hypocotyl transformation (Moloney et al., 1989 Plant Cell Reports 8:238-242; De Block et al., 1989 Plant Physiol. 91:694-701). Use of antibiotics for Agrobacterium and plant selection depends on the binary vector and the Agrobacterium strain used for transformation. Rapeseed selection is normally performed using kanamycin as selectable plant marker. Agrobacterium mediated gene transfer to flax can be performed using, for example, a technique described by Mlynarova et al., 1994 Plant Cell Report 13:282-285. Additionally, transformation of soybean can be performed using for example a technique described in European Patent No. 0424 047, U.S. Pat. No. 5,322,783, European Patent No. 0397 687, U.S. Pat. No. 5,376,543 or U.S. Pat. No. 5,169,770. Transformation of maize can be achieved by particle bombardment, polyethylene glycol mediated DNA uptake or via the silicon carbide fiber technique (see, for example, Freeling and Walbot “The maize handbook” Springer Verlag New York (1993) ISBN 3-540-97826-7). A specific example of maize transformation is found in U.S. Pat. No. 5,990,387 and a specific example of wheat transformation can be found in PCT Application No. WO 93/07256.

[0325] Growing the modified plants under stress conditions and then screening and analyzing the growth characteristics and/or metabolic activity assess the effect of the genetic modification in plants on increased yield under condition of transient and repetitive abiotic stress. Such analysis techniques are well known to one skilled in the art. They include next to screening (Römpp Lexikon Biotechnologie, Stuttgart/New York: Georg Thieme Verlag 1992, “screening” p. 701) dry weight, wet weight, protein synthesis, carbohydrate synthesis, lipid synthesis, evapotranspiration rates, general plant and/or crop yield, flowering, reproduction, seed setting, root growth, respiration rates, photosynthesis rates, etc. (Applications of HPLC in Biochemistry in: Laboratory Techniques in Biochemistry and Molecular Biology, vol. 17; Rehm et al., 1993 Biotechnology, vol. 3, Chapter III: Product recovery and purification, page 469-714, VCH: Weinheim; Better, P. A. et al., 1988 Bioseparations: downstream processing for biotechnology, John Wiley and Sons; Kennedy, J. F. and Cabral, J. M. S., 1992 Recovery processes for biological materials, John Wiley and Sons; Shaeiwitz, J. A. and Henry, J. D., 1988 Biochemical separations, in: Ulmann's Encyclopedia of Industrial Chemistry, vol. B3, Chapter 11, page 1-27, VCH: Weinheim; and Dechow, F. J. (1989) Separation and purification techniques in biotechnology, Noyes Publications).

[0326] In one embodiment, the present invention relates to a method for the identification of a gene product conferring increased resistance to plant disease, preferably pathogenic fungi and/or nematodes as compared to a corresponding non-transformed wild type control cell in a cell of an organism for example plant, comprising the following steps:
[0327] a) contacting, e.g. hybridising, some or all nucleic acid molecules of a sample, e.g. cells, tissues, plants or microorganisms or a nucleic acid library, which can contain a candidate gene encoding a gene product conferring increased stress resistance, preferably to plant disease, preferably caused by pathogenic fungi and/or nematodes, with a nucleic acid molecule as shown in column 5 or 7 of Table I A or B or a functional homologue thereof;
[0328] b) identifying the nucleic acid molecules, which hybridize under relaxed stringent conditions with said nucleic acid molecule, in particular to the nucleic acid molecule sequence shown in column 5 or 7 of Table I and, optionally, isolating the full length cDNA clone or complete genomic clone;
[0329] c) identifying the candidate nucleic acid molecules or a fragment thereof in host cells, preferably in a plant cell
[0330] d) increasing the expressing of the identified nucleic acid molecules in the host cells for which increased resistance to plant disease, preferably caused by pathogenic fungi and/or nematodes as desired
[0331] e) assaying the level of increased stress resistance of the host cells; and
[0332] f) identifying the nucleic acid molecule and its gene product which increased expression confers increased stress resistance in the host cell compared to the wild type.
   Relaxed hybridisation conditions are: After standard hybridisation procedures washing steps can be performed at low to medium stringency conditions usually with washing conditions of 40°-55° C. and salt conditions between 2×SSC and 0.2×SSC with 0.1% SDS in comparison to stringent washing conditions as e.g. 60° to 68° C. with 0.1% SDS. Further examples can be found in the references listed above for the stringend hybridization conditions. Usually washing steps are repeated with increasing stringency and length until a useful signal to noise ratio is detected and depend on many factors as the target, e.g. its purity, GC-content, size etc, the probe, e.g. its length, is it a RNA or a DNA probe, salt conditions, washing or hybridisation temperature, washing or hybridisation time etc.

[0333] In another embodiment, the present invention relates to a method for the identification of a gene product the expression of which confers increased stress resistance in a cell, comprising the following steps:
[0334] a) identifying a nucleic acid molecule in an organism, which is at least 20%, preferably 25%, more preferably 30%, even more preferred are 35%. 40% or 50%, even more preferred are 60%, 70% or 80%, most preferred are 90% or 95% or more homolog to the nucleic acid molecule encoding a protein comprising the polypeptide molecule as shown in column 5 or 7 of Table II or comprising a consensus sequence or a polypeptide motif as shown in column 7 of Table IV or being encoded by a nucleic acid molecule comprising a polynucleotide as shown in column 5 or 7 of Table I or a homologue thereof as described herein, for example via homology search in a data bank;
[0335] b) enhancing the expression of the identified nucleic acid molecules in the host cells;
[0336] c) assaying the level of increased stress resistance, preferably to plant disease, preferably caused by pathogenic fungi and/or nematodes in the host cells; and
[0337] d) identifying the host cell, in which the enhanced expression confers increased stress resistance in the host cell compared to a wild type.

[0338] Further, the nucleic acid molecule disclosed herein, in particular the nucleic acid molecule shown column 5 or 7 of Table I A or B, may be sufficiently homologous to the sequences of related species such that these nucleic acid molecules may serve as markers for the construction of a genomic map in related organism or for association mapping. Furthermore natural variation in the genomic regions corresponding to nucleic acids disclosed herein, in particular the nucleic acid molecule shown column 5 or 7 of Table I A or B, or homologous thereof may lead to variation in the activity of the proteins disclosed herein, in particular the proteins comprising polypeptides as shown in column 5 or 7 of Table II A or B or comprising the consensus sequence or the polypeptide motif as shown in column 7 of Table IV, and their homolgous and in consequence in natural variation in tolerance and/or resistance to environmental stess and biomass production.

In consequence natural variation eventually also exists in form of more active allelic variants leading already to a relative increase in the tolerance and/or resistance to environmental stress and biomass production. Different variants of the nucleic acids molecule disclosed herein, in particular the nucleic acid comprising the nucleic acid molecule as shown column 5 or 7 of Table I A or B, which corresponds to different tolerance and/or stress resistance and biomass production levels can be indentified and used for marker assisted breeding for increased stress resistance, preferably to plant disease, preferably caused by pathogenic fungi and/or nematodes.

[0339] Accordingly, the present invention relates to a method for breeding plants for increased stress resistance, preferably to plant disease, preferably caused by pathogenic fungi and/or nematodes, comprising
[0340] a) selecting a first plant variety with increased stress resistance, preferably to plant disease, preferably caused by pathogenic fungi and/or nematodes based on increased expression of a nucleic acid of the invention as disclosed herein, in particular of a nucleic acid molecule comprising a nucleic acid molecule as shown in column 5 or 7 of Table I A or B or a polypeptide comprising a polypeptide as shown in column 5 or 7 of Table II A or B or comprising a consensus sequence or a polypeptide motif as shown in column 7 of Table IV, or a homologue thereof as described herein;
[0341] b) associating the level of tolerance and/or resistance to stress, preferably to plant disease, preferably caused by pathogenic fungi and/or nematodes and biomass production with the expression level or the genomic structure of a gene encoding said polypeptide or said nucleic acid molecule;
[0342] c) crossing the first plant variety with a second plant variety, which significantly differs in its level of tolerance and/or resistance to stress and biomass production and
[0343] e) identifying, which of the offspring varieties has got increased levels level of tolerance and/or resistance to stress and biomass production by the expression level of said polypeptide or nucleic acid molecule or the genomic structure of the genes encoding said polypeptide or nucleic acid molecule of the invention.
   In one embodiment, the expression level of the gene according to step (b) is increased.

[0344] Yet another embodiment of the invention relates to a process for the identification of a compound conferring increased resistance to plant disease, preferably pathogenic fungi and/or nematodes as compared to a corresponding non-transformed wild type control plant cell, a plant or a part thereof in a plant cell, a plant or a part thereof, a plant or a part thereof, comprising the steps:
[0345] a) culturing a plant cell; a plant or a part thereof maintaining a plant expressing the polypeptide as shown in column 5 or 7 of Table II or being encoded by a nucleic acid molecule comprising a polynucleotide as shown in column 5 or 7 of Table I or a homologue thereof as described herein or a polynucleotide encoding said polypeptide and conferring an increased resistance to plant disease, preferably pathogenic fungi and/or nematodes as compared to a corresponding non-transformed wild type control plant cell, a plant or a part thereof; a non-transformed wild type plant or a part thereof and providing a readout system capable of interacting with the polypeptide under suitable conditions which permit the interaction of the polypeptide with this readout system in the presence of a chemical compound or a sample comprising a plurality of chemical compounds and capable of providing a detectable signal in response to the binding of a chemical compound to said polypeptide under conditions which permit the expression of said readout system and of the protein as shown in column 5 or 7 of Table II or being encoded by a nucleic acid molecule comprising a polynucleotide as shown in column 5 or 7 of Table I or a homologue thereof as described herein; and
[0346] b) identifying if the chemical compound is an effective agonist by detecting the presence or absence or decrease or increase of a signal produced by said readout system.
   Said compound may be chemically synthesized or microbiologically produced and/or comprised in, for example, samples, e.g., cell extracts from, e.g., plants, animals or microorganisms, e.g. pathogens. Furthermore, said compound(s) may be known in the art but hitherto not known to be capable of activating the polypeptide of the present invention. The reaction mixture may be a cell free extract or may comprise a cell or tissue culture. Suitable set ups for the process for identification of a compound of the invention are known to the person skilled in the art and are, for example, generally described in Alberts et al., Molecular Biology of the Cell, third edition (1994), in particular Chapter 17. The compounds may be, e.g., added to the reaction mixture, culture medium, injected into the cell or sprayed onto the plant.
   If a sample containing a compound is identified in the process, then it is either possible to isolate the compound from the original sample identified as containing the compound capable of activating or increasing yield production under condition of transient and repetitive abiotic stress as compared to a corresponding non-transformed wild type, or one can further subdivide the original sample, for example, if it consists of a plurality of different compounds, so as to reduce the number of different substances per sample and repeat the method with the subdivisions of the original sample. Depending on the complexity of the samples, the steps described above can be performed several times, preferably until the sample identified according to the said process only comprises a limited number of or only one substance(s). Preferably said sample comprises substances of similar chemical and/or physical properties, and most preferably said substances are identical. Preferably, the compound identified according to the described method above or its derivative is further formulated in a form suitable for the application in plant breeding or plant cell and tissue culture.
   The compounds which can be tested and identified according to said process may be expression libraries, e.g., cDNA expression libraries, peptides, proteins, nucleic acids, antibodies, small organic compounds, hormones, peptidomimetics, PNAs or the like (Milner, Nature Medicine 1 (1995), 879-880; Hupp, Cell 83 (1995), 237-245; Gibbs, Cell 79 (1994), 193-198 and references cited supra). Said compounds can also be functional derivatives or analogues of known inhibitors or activators. Methods for the preparation of chemical derivatives and analogues are well known to those skilled in the art and are described in, for example, Beilstein, Handbook of Organic Chemistry, Springer edition New York Inc., 175 Fifth Avenue, New York, N.Y. 10010 U.S.A. and Organic Synthesis, Wiley, New York, USA. Furthermore, said derivatives and analogues can be tested for their effects according to methods known in the art. Furthermore, peptidomimetics and/or computer aided design of appropriate derivatives and analogues can be used, for example, according to the methods described above. The cell or tissue that may be employed in the process preferably is a host cell, plant cell or plant tissue of the invention described in the embodiments hereinbefore.
   Thus, in a further embodiment the invention relates to a compound obtained or identified according to the method for identifying an agonist of the invention said compound being an antagonist of the polypeptide of the present invention.
   Accordingly, in one embodiment, the present invention further relates to a compound identified by the method for identifying a compound of the present invention.

[0347] In one embodiment, the invention relates to an antibody specifically recognizing the compound or agonist of the present invention.

[0348] The invention also relates to a diagnostic composition comprising at least one of the aforementioned nucleic acid molecules, antisense nucleic acid molecule, RNAi, snRNA, dsRNA, siRNA, miRNA, ta-siRNA, cosuppression molecule, ribozyme, vectors, proteins, antibodies or compounds of the invention and optionally suitable means for detection.

The diagnostic composition of the present invention is suitable for the isolation of mRNA from a cell and contacting the mRNA so obtained with a probe comprising a nucleic acid probe as described above under hybridizing conditions, detecting the presence of mRNA hybridized to the probe, and thereby detecting the expression of the protein in the cell. Further methods of detecting the presence of a protein according to the present invention comprise immunotechniques well known in the art, for example enzyme linked immunoadsorbent assay. Furthermore, it is possible to use the nucleic acid molecules according to the invention as molecular markers or primers in plant breeding. Suitable means for detection are well known to a person skilled in the art, e.g. buffers and solutions for hydridization assays, e.g. the afore-mentioned solutions and buffers, further and means for Southern-, Western-, Northern- etc.—blots, as e.g. described in Sambrook et al. are known. In one embodiment diagnostic composition contain PCR primers designed to specifically detect the presense or the expression level of the nucleic acid molecule to be reduced in the process of the invention, e.g. of the nucleic acid molecule of the invention, or to descriminate between different variants or alleles of the nucleic acid molecule of the invention or which activity is to be reduced in the process of the invention.

[0349] In another embodiment, the present invention relates to a kit comprising the nucleic acid molecule, the vector, the host cell, the polypeptide, or the antisense, RNAi, snRNA, dsRNA, siRNA, miRNA, ta-siRNA, cosuppression molecule, or ribozyme molecule, or the viral nucleic acid molecule, the antibody, plant cell, the plant or plant tissue, the harvestable part, the propagation material and/or the compound and/or agonist identified according to the method of the invention.

The compounds of the kit of the present invention may be packaged in containers such as vials, optionally with/in buffers and/or solution. If appropriate, one or more of said components might be packaged in one and the same container. Additionally or alternatively, one or more of said components might be adsorbed to a solid support as, e.g. a nitrocellulose filter, a glas plate, a chip, or a nylon membrane or to the well of a micro titerplate. The kit can be used for any of the herein described methods and embodiments, e.g. for the production of the host cells, transgenic plants, pharmaceutical compositions, detection of homologous sequences, identification of antagonists or agonists, as food or feed or as a supplement thereof or as supplement for the treating of plants, etc.
Further, the kit can comprise instructions for the use of the kit for any of said embodiments.
In one embodiment said kit comprises further a nucleic acid molecule encoding one or more of the aforementioned protein, and/or an antibody, a vector, a host cell, an antisense nucleic acid, a plant cell or plant tissue or a plant. In another embodiment said kit comprises PCR primers to detect and discrimante the nucleic acid molecule to be reduced in the process of the invention, e.g. of the nucleic acid molecule of the invention.

[0350] In a further embodiment, the present invention relates to a method for the production of an agricultural composition providing the nucleic acid molecule for the use according to the process of the invention, the nucleic acid molecule of the invention, the vector of the invention, the antisense, RNAi, snRNA, dsRNA, siRNA, miRNA, ta-siRNA, cosuppression molecule, ribozyme, or antibody of the invention, the viral nucleic acid molecule of the invention, or the polypeptide of the invention or comprising the steps of the method according to the invention for the identification of said compound or agonist; and formulating the nucleic acid molecule, the vector or the polypeptide of the invention or the agonist, or compound identified according to the methods or processes of the present invention or with use of the subject matters of the present invention in a form applicable as plant agricultural composition.

[0351] In another embodiment, the present invention relates to a method for the production of the plant culture composition comprising the steps of the method of the present invention; and formulating the compound identified in a form acceptable as agri-cultural composition.

Under “acceptable as agricultural composition” is understood, that such a composition is in agreement with the laws regulating the content of fungicides, plant nutrients, herbizides, etc. Preferably such a composition is without any harm for the protected plants and the animals (humans included) fed therewith.

[0352] Throughout this application, various publications are referenced. The disclosures of all of these publications and those references cited within those publications in their entireties are hereby incorporated by reference into this application in order to more fully describe the state of the art to which this invention pertains.

It should also be understood that the foregoing relates to preferred embodiments of the present invention and that numerous changes and variations may be made therein without departing from the scope of the invention. The invention is further illustrated by the following examples, which are not to be construed in any way as limiting. On the contrary, it is to be clearly understood that various other embodiments, modifications and equivalents thereof, which, after reading the description herein, may suggest themselves to those skilled in the art without departing from the spirit of the present invention and/or the scope of the claims.

### EXAMPLE 1

### Engineering Stress-Tolerant Arabidopsis Plants by Over-Expressing Genes Coding for DRCP

### EXAMPLE 1

### Cloning of the Inventive Sequences According to SEQ ID NO: 9 or SEQ ID NO: 50, Respectively, for the Expression in Plants

[0353] Unless otherwise specified, standard methods as described in Sambrook et al., Molecular Cloning: A laboratory manual, Cold Spring Harbor 1989, Cold Spring Harbor Laboratory Press are used.
The inventive sequences were amplified by PCR as described in the protocol of the Pfu Ultra, Pfu Turbo or Herculase DNA polymerase (Stratagene).
The composition for the protocol of the Pfu Ultra, Pfu Turbo or Herculase DNA polymerase was as follows: 1×PCR buffer (Stratagene), 0.2 mM of each dNTP, 100 ng genomic DNA of Saccharomyces cerevisiae (strain S288C; Research Genetics, Inc., now Invitrogen) or Escherichia coli (strain MG1655; E. coli Genetic Stock Center), 50 pmol forward primer, 50 pmol reverse primer, 2.5 u Pfu Ultra, Pfu Turbo or Herculase DNA polymerase.
The amplification cycles were as follows:
Saccharomyces cerevisiae: 1 cycle of 2-3 minutes at 94-95° C., followed by 25-36 cycles of in each case 1 minute at 95° C. or 30 seconds at 94° C., 45 seconds at 50° C., 30 seconds at 50° C. or 30 seconds at 55° C. and 210-480 seconds at 72° C., followed by 1 cycle of 8 minutes at 72° C., then 4° C.
Escherichia coli: 1 cycle of 2-3 minutes at 94° C., followed by 25-30 cycles of in each case 30 seconds at 94° C., 30 seconds at 55-60° C. and 5-10 minutes at 72° C., followed by 1 cycle of 10 minutes at 72° C., then 4° C.
The following adapter sequences were added to Saccharomyces cerevisiae ORF specific primers (see table IV) for cloning purposes:

SEQ ID NO: 5
i) foward primer: 5′-GGAATTCCAGCTGACCACC-3′
SEQ ID NO: 6
ii) reverse primer: 5′-GATCCCCGGGAATTGCCATG-3′

The following adapter sequences were added to Escherichia coli ORF specific primers for cloning purposes:

SEQ ID NO: 7
iii) forward primer: 5′-TTGCTCTTCC-3′
SEQ ID NO: 8
iiii) reverse primer 5′-TTGCTCTTCG-3′

Therefore for amplification and cloning of Saccharomyces cerevisiae SEQ ID NO: 50, a primer consisting of the adaptor sequence i) and the ORF specific sequence SEQ ID NO:756 and a second primer consisting of the adaptor sequence ii) and the ORF specific sequence SEQ ID NO: 757 were used.
For amplification and cloning of Escherichia coli SEQ ID NO: 9, a primer consisting of the adaptor sequence iii) and the ORF specific sequence SEQ ID NO: 43 and a second primer consisting of the adaptor sequence iiii) and the ORF specific sequence SEQ ID NO: 44 were used.

[0354] Construction of Binary Vectors for Non-Targeted Expression of Proteins

“Non-targeted” expression in this context means, that no additional targeting sequence was added to the ORF to be expressed.
For non-targeted constitutive expression in preferentially green tissues the following binary vectors were used for cloning: pMTX155 SEQ ID NO: 1 and VC-MME220-1qcz SEQ ID NO: 2.
For cloning the ORFs from yeast, the binary vector pMTX155 containing the enhanced 35S (Big35S) promoter SEQ ID NO: 3 (Comai et al., Plant Mol Biol 15, 373-383 (1990) was used.
For cloning the ORFs from E. coli, the binary vector VC-MME220-1 qcz containing the super promoter SEQ ID NO: 4 (Ni et al., Plant Journal 7, 661 (1995), WO 95/14098) was used.
Other useful binary vectors are known to the skilled worker; an overview of binary vectors and their use can be found in Hellens, R., Mullineaux, P. and Klee H., ((2000) “A guide to Agrobacterium binary vectors”, Trends in Plant Science, Vol. 5 No. 10, 446-451]. Such vectors have to be equally equipped with appropriate promoters and targeting sequences.

[0355] For cloning ORFs from S. cerevisiae amplified as described above into a vector containing the Resgen adapter sequence (pMTX155) the vector DNA was treated with the restriction enzyme NcoI. For cloning of ORFs from E. coli into the vectors containing the Colic adapter sequence (VC-MME220-1qcz), the vector DNA was treated with the restriction enzymes PacI and NcoI following the standard protocol (MBI Fermentas). In all cases the reaction was stopped by inactivation at 70° C. for 20 minutes and purified over QIAquick or NucleoSpin Extract II columns following the standard protocol (Qiagen or Macherey-Nagel).

Then the PCR-product representing the amplified ORF with the respective adapter sequences and the vector DNA were treated with T4 DNA polymerase according to the standard protocol (MBI Fermentas) to produce single stranded overhangs with the parameters 1 unit T4 DNA polymerase at 37° C. for 2-10 minutes for the vector and 1-2 u T4 DNA polymerase at 15-17° C. for 10-60 minutes for the PCR product representing the ORF.
The reaction was stopped by addition of high-salt buffer and purified over QIAquick QIAquick or NucleoSpin Extract II columns following the standard protocol (Qiagen or Macherey-Nagel).
Approximately 30-60 ng of prepared vector and a defined amount of prepared amplificate were mixed and hybridized at 65° C. for 15 minutes followed by 37° C. 0.1° C./1 seconds, followed by 37° C. 10 minutes, followed by 0.1° C./1 seconds, then 4-10° C.
The ligated constructs were transformed in the same reaction vessel by addition of competent E. coli cells (strain DH5alpha) and incubation for 20 minutes at 1° C. followed by a heat shock for 90 seconds at 42° C. and cooling to 1-4° C. Then, complete medium (SOC) was added and the mixture was incubated for 45 minutes at 37° C. The entire mixture was subsequently plated onto an agar plate with 0.05 mg/ml kanamycin and incubated overnight at 37° C.
The outcome of the cloning step was verified by amplification with the aid of primers which bind upstream and downstream of the integration site, thus allowing the amplification of the insertion. The amplifications were carried out as described in the protocol of Taq DNA polymerase (Gibco-BRL).
The amplification cycles were as follows: 1 cycle of 1-5 minutes at 94° C., followed by 35 cycles of in each case 15-60 seconds at 94° C., 15-60 seconds at 50-66° C. and 5-15 minutes at 72° C., followed by 1 cycle of 10 minutes at 72° C., then 4-16° C.
Several colonies were checked, but only one colony for which a PCR product of the expected size was detected was used in the following steps.
A portion of this positive colony was transferred into a reaction vessel filled with complete medium (LB) supplemented with kanamycin (50 pg/ml) and incubated overnight at 37° C.
The plasmid preparation was carried out as specified in the Qiaprep or NucleoSpin Multi-96 Plus standard protocol (Qiagen or Macherey-Nagel).

### EXAMPLE 2

### Generation of Transgenic Plants which Express SEQ ID NO: 9 or SEQ ID NO: 50 Respectively

[0356] 1-5 ng of the plasmid DNA isolated was transformed by electroporation or transformation into competent cells of Agrobacterium tumefaciens, of strain GV 3101 pMP90 (Koncz and Schell, Mol. Gen. Gent. 204, 383, 1986). Thereafter, complete medium (YEP) was added and the mixture was transferred into a fresh reaction vessel for 3 hours at 28° C. Thereafter, all of the reaction mixture was plated onto YEP agar plates supplemented with the respective antibiotics, e.g. rifampicine (0.1 mg/ml), gentamycine (0.025 mg/ml and kanamycine (0.05 mg/ml) and incubated for 48 hours at 28° C.
The agrobacteria that contains the plasmid construct were then used for the transformation of plants.
A colony was picked from the agar plate with the aid of a pipette tip and taken up in 3 ml of liquid TB medium, which also contained suitable antibiotics as described above. The preculture was grown for 48 hours at 28° C. and 120 rpm.
400 ml of LB medium containing the same antibiotics as above were used for the main culture. The preculture was transferred into the main culture. It was grown for 18 hours at 28° C. and 120 rpm. After centrifugation at 4 000 rpm, the pellet was resuspended in infiltration medium (MS medium, 10% sucrose).
In order to grow the plants for the transformation, dishes (Piki Saat 80, green, provided with a screen bottom, 30×20×4.5 cm, from Wiesauplast, Kunststofftechnik, Germany) were half-filled with a GS 90 substrate (standard soil, Werkverband E.V., Germany). The dishes were watered overnight with 0.05% Proplant solution (Chimac-Apriphar, Belgium). A. thaliana C24 seeds (Nottingham Arabidopsis Stock Centre, UK; NASC Stock N906) were scattered over the dish, approximately 1000 seeds per dish. The dishes were covered with a hood and placed in the stratification facility (8 h, 110 μmol/m²s, 22° C.; 16 h, dark, 6° C.). After 5 days, the dishes were placed into the short-day controlled environment chamber (8 h, 130 μmol/m²s¹, 22° C.; 16 h, dark, 20° C.), where they remained for approximately 10 days until the first true leaves had formed.
The seedlings were transferred into pots containing the same substrate (Teku pots, 7 cm, LC series, manufactured by Poppelmann GmbH & Co, Germany). Five plants were pricked out into each pot. The pots were then returned into the short-day controlled environment chamber for the plant to continue growing.
After 10 days, the plants were transferred into the greenhouse cabinet (supplementary illumination, 16 h, 340 μE/m²s, 22° C.; 8 h, dark, 20° C.), where they were allowed to grow for further 17 days.
For the transformation, 6-week-old Arabidopsis plants, which had just started flowering were immersed for 10 seconds into the above-described agrobacterial suspension which had previously been treated with 10 μl Silwett L77 (Crompton S. A., Osi Specialties, Switzerland). The respective method is described in Clough and Bent, 1998 (Clough, J C and Bent, A F. 1998 Floral dip: a simplified method for Agrobacterium-mediated transformation of Arabidopsis thaliana, Plant J. 16:735-743).
The plants were subsequently placed for 18 hours into a humid chamber. Thereafter, the pots were returned to the greenhouse for the plants to continue growing. The plants remained in the greenhouse for another 10 weeks until the seeds were ready for harvesting.
Depending on the resistance marker used for the selection of the transformed plants the harvested seeds were planted in the greenhouse and subjected to a spray selection or else first sterilized and then grown on agar plates supplemented with the respective selection agent. Since the vector contained the bar gene as the resistance marker, plantlets were sprayed four times at an interval of 2 to 3 days with 0.02% BASTA® and transformed plants were allowed to set seeds. The plants remained in the greenhouse for another 10 weeks until the seeds were ready for harvesting. The seeds of the transgenic A. thaliana plants were stored in the freezer (at −20° C.).

### EXAMPLE 3

### Fungal Resistance Screen

[0357] Plant Growth and Experiment Design

In a standard experiment nutrient rich soil (GS90, Tantau, Wansdorf, Germany) were used. Pots were filled with soil and placed into trays. Water was added to the trays to let the soil take up appropriate amount of water for the sowing procedure. The seeds for transgenic Arabidopsis thaliana C24 plants were sown in pots (10 cm diameter). Then the filled tray was covered with a transparent lid without holes and transferred into the shelf system of the growth chamber. Lid and pots were sprayed daily. Stratification was established for a period of 4 days in the dark at 4° C. for 8 h, in the light (220 μmol/m²s) at 20° C. for 16 h, relative humidity with 68%. After 4 days the parameter were changed to 12 h light and 12 h darkness and covers were removed. BASTA selection was done at day 5, 7, 10 and 12 after sowing by spraying pots with plantlets from the top. Therefore, a 0.02% (v/v) solution of BASTA concentrate (183 g/l glufosinate-ammonium) in tap water was sprayed. The location of the trays inside the chambers was changed on working days after sowing. Watering were done as necessary after covers were removed from the trays. Plants were piqued 14 days after sowing in another pot with GS90, 5 plants together in 1 pot and 3 pots per line. 4 lines and 1 wild type (in the middle) were placed together in 1 tray. The tray was covered with the lid and sprayed for 3 days. Positive (sensitive=pad3-1-wt-F1-(1)) and negative (resistant=Col-0-Lehle-F1-(1)) controls were in an extra tray. 28 days after sowing phenotypic information was valued in case of plants differ from the wild type control. 31 days after sowing tap water were added in the tray in a height of 1 cm. A day later plants were sprayed 3 times with the fungal Alternaria brassicicola or Alternaria alternate (1.5×10⁶ spores/ml) and covered again. Lid were sprayed 2 times a day with water for 2 days. 3 and 4 days after inoculation the evaluation were done.

[0358] Cultivation of the Fungus and Inoculation

The phytopythogenic fungi Alternaria brassicicola and Alternaria alternata were maintained on 2% Agar containing 2% malt-extract. The plates were incubated at 24° C. with a 12h light/dark rhythm. To inoculate the plants, spore suspensions were prepared. Twelve-day-old fungal culture plates were rinsed with 2% malt-extract solution. The crude spore-mycelium suspension were filtered through 1 layer of gauze. The spore densities were determined by counting in a Thoma-chamber. A freshly harvested spore suspension with a density of 1.5×10⁶ Spores/ml was used to inoculate well watered plants.

[0359] Scoring of the Plants Symptoms

The disease symptoms were scored in comparison to untransformed wild type control plants. The range of scoring were between 1 and 5. Leafs with symptoms of chlorotic areas and mazaration of the tissue were counted of all three pots. The phenotype (bigness and habitus) of the plants had an influence to the final scoring.

TABLE 2
List of ORF (Column 1) from yeast (S. cerevisiae) or E. coli
(Column 2) which resulted in enhanced fungal resistance as shown
in column 3 in comparison to non-transformed wild type plants

| | | | Resistance against Alternaria |
|---|---|---|---|
| Seq ID NO | Orf | Organism | species |
| 9 | B2664 | E. coli | Alternata and brassicicola |
| 50 | YNL090w | yeast | Alternata and brassicicola |

[0360] Materials and General Methods

Unless indicated otherwise, chemicals and reagents in the Examples were obtained from Sigma Chemical Company (St. Louis, Mo.), restriction endonucleases were from New England Biolabs (Beverly, Mass.) or Roche (Indianapolis, Ind.), oligonucleotides were synthesized by MWG Biotech Inc. (High Point, N.C.), and other modifying enzymes or kits regarding biochemicals and molecular biological assays were from Clontech (Palo Alto, Calif.), Pharmacia Biotech (Piscataway, N.J.), Promega Corporation (Madison, Wis.), or Stratagene (La Jolla, Calif.). Materials for cell culture media were obtained from Gibco/BRL (Gaithersburg, Md.) or DIFCO (Detroit, Mich.). The cloning steps carried out for the purposes of the present invention, such as, for example, restriction cleavages, agarose gel electrophoresis, purification of DNA fragments, transfer of nucleic acids to nitrocellulose and nylon membranes, linking DNA fragments, transformation of E. coli cells, growing bacteria, multiplying phages and sequence analysis of recombinant DNA, are carried out as described by Sambrook (1989). The sequencing of recombinant DNA molecules is carried out using ABI laser fluorescence DNA sequencer following the method of Sanger (Sanger 1977).

### EXAMPLE 4

### Primary Screening of Arabidopsis Lines with Beet Cyst Nematode

[0361] Sufficient seeds from selected lines were packaged in filter paper envelopes and given an arbitrary identifier. Packaged seed were used for primary screening. Primary screening consisted of the following steps: 1) sterilization by chlorine gas, 2) growth on selective media; 3) transfer to assay plates; 4) inoculation of seedlings in assay plates with defined amount J2 larvae; 5) counting of J4 female nematodes and cysts and 6) analysis of results; and 7) selection of lead lines.

### 1. Sterilization by Chlorine Gas

[0362] In order to sterilize seeds of selected lines, seeds enveloped in a Whatman filter were surface-sterilized in 70% ethanol, then submerged in 5% calcium hypochlorite and rinsed extensively with sterile water.

### 2. Growth of Seedlings on Selective Media

[0363] Sterilized seeds consisting of a population segregating for expression of any given microbial gene were placed on Petri dishes containing Murashige Skoog medium with the appropriate selection agent added. Depending on the arabidopsis line, the selection agent used was either 50 μg/ml glufosinate (Bayer Crop Science Kansas City, Mo.), 100 nM imazethapyr (BASF Corporation, RTP, NC); or 50 pg/ml kanamycin. All seeds were placed at 4° C. for 72 hours and then transferred to a growth chamber set at 22° C. After 10 days, seedlings were selected on the basis of size and color. Individual seedlings that did not contain the transgene (i.e. null segregants) were stunted and chlorotic. Individual seedlings containing the transgene designed to express any given microbial gene were green and had fully expanded cotyledons. These individuals were selected for transfer to assay plates.

### 3. Transfer to Assay Plates

[0364] Selected seedlings from were transferred with forceps to 12 well assay plates containing 0.2 strength Knop medium solidified with 0.8% Daishin agar (Sijmons et al 1991), and maintained in a growth chamber for 10 days at 24° C. with a 16 h photoperiod. At least two plates containing controls were used for each set of inoculations.

### 4. Inoculation of Seedlings

[0365] Transferred seedlings were grown under the same conditions for 10 additional days and then inoculated with a defined number (90-100) of sterilized Heterodera schachtii J2 larvae. Inoculated seedlings were maintained a growth chamber for an additional 28 days.

### 5. Data Acquisition

[0366] After 28 days, plates were removed observed under a dissecting scope. The numbers of mature females (J4 females and adult-stage cysts) were counted and results recorded. A root score of 1-5 was assigned to each inoculated seedling with 1 being small and 5 being large. In addition, high-resolution images were taken on the day of inoculation and the day of counting.

### 6. Analysis of Screening Results and Selection of Lead Lines

[0367] Recorded results were subjected to statistical analysis using a SAS software package (SAS, Cary, N.C.). Analysis of results revealed sets of lines within groups inoculated with a particular batch of nematodes that had lower (putative resistant lines) or higher (putative hyper-suceptible lines) female numbers. Lines with a lower number of mature females were selected from sets inoculated with nematode batches resulting in a mean value of 10 mature females per seedling.

### EXAMPLE 5

### Validation Screening of Selected Arabidopsis Lines

[0368] Sufficient seeds from lead lines selected on the basis of primary screening were packaged in filter paper envelopes and given an arbitrary identifier. Packaged seed were then used in a validation assay. A validation assay consisted of the same steps as in Example 1 with the exceptions described as follows.
For the infection assay, 20 seedlings per line were transferred to 6-well plates containing Knop medium in order to allow greater root development relative to 12-well plates. Each plate contained two seedlings from a line and two controls. Thus, each plate contained two test lines and all replicates and corresponding controls for a given line were present on 10 plates. The seedlings were inoculated with a greater number (250) of sterile J2 larvae relative to the first screen. These larvae were produced from in vitro root cultures and therefore the sterilization described in Example 1 was not necessary. Mature females were counted as described in the previous example and data analyzed by a t-test using SAS software package (SAS, Cary, N.C.). Only those lines having corresponding controls averaging at least 20 J4 females per well, and showing a 25% difference from control plates with a p<0.05 were considered to be a validated lead. Cyst count data for validated leads overexpressing the sequences described by SEQ ID NO: 9 and 50 are shown in the Figures.

### Example 6

### Vector Construction of PCP Encoding Genes for Soybean Transformation

[0369] Plant transformation binary vectors to over-express the PCP genes described by SEQ ID NO: 9 and 50 and 762 were generated using constitutive and soybean cyst nematode (SCN) inducible promoters. For this, the open reading frames described by SEQ ID NO: 9 and 50 and 762 were operably linked to a constitutive ubiquitin promoter and the SCN inducible promoters TPP-like and MtN3-like. The resulting plant binary vectors contain a plant transformation selectable marker consisting of a modified Arabidopsis AHAS gene conferring tolerance to the herbicide Arsenal. The binary vectors designed to overexpress the PCPs will be transformed into disarmed A. rhizogenes strain K599 in preparation for transformation and SCN bioassay to determine effect on SCN cyst count.

### EXAMPLE 7

### Nematode Bioassay

[0370] The rooted explant assay will be employed to demonstrate expression and resulting nematode resistance. This assay can be found in co-pending application U.S. Ser. No. 60/871,258 filed on Dec. 21, 2006, hereby incorporated by reference, and in the description that follows.

### Soybean Seed Germination

[0371] Clean soybean seeds from soybean cultivar W82 are sterilized in a chamber with a chlorine gas produced by adding 3.5 ml 12N HCl drop wise into 100 ml bleach. All operations are conducted in a fume hood. After 24 hours in the chamber, seeds are removed and used immediately or stored at room temperature until use. Discolored or cracked seeds are removed. To imbibe seeds, warm GM medium is poured around seeds until the seeds are entirely covered by the medium. Seedlings are grown in the light (150 μM m⁻² s⁻¹) for 5-7 days until the epicotyl is extended beyond the cotyledons. Seedlings can be stored at 4° C. overnight before being used in transformation. The GM (Germination Medium) comprises: 1×B5 salts and vitamins, 1×MS iron stock, 2% sucrose, and 0.8% Noble agar at pH 5.8.

### Agrobacterium Preparation

[0372] Three days before Agrobacterium inoculation, an Agrobacterium culture, for example, the disarmed A. rhizogenes strain K599 liquid culture, is placed in 5 ml LB+Kan50 (containing 50 ug/ml Kanamycin) media in a 28° C. shaker overnight. The next day, 1 ml of the culture is taken and spread onto an LB +Kan50 agar plate. The plates are incubated in a 28° C. incubator for two days. At the end of the two-day period the plates will be covered with thick colonies. One plate is prepared for every 50 explants to be inoculated.

### Soybean Explant Preparation—Cotyledon

[0373] Cotyledons containing the proximal end from its connection with the seedlings are used as another type of explant for transformation. The cut end is the target for Agrobacterium inoculation.
Transformation of Soybean Plant and Co-Cultivation with Agrobacterium rhizogenes
After the explants are cut off the seedlings, the cut end is immediately dipped onto the thick A. rhizogenes colonies prepared in Example 3 so that the colonies are visible on the cut end. The explants are placed onto 1% agar in Petri dishes for co-cultivation. Approximately 10 explants are placed in one dish. The dishes are sealed with Saran wrap and co-cultured at 25-27° C. under light at 30-50 mmol m⁻² S⁻¹ for 6 days.

### Soybean Plant Root Induction

[0374] After the transformation and co-cultivation step, soybean explants are transferred to rooting induction medium with a selection agent, for example, S-B5-605 for Bar gene selection (De Block et al. 1987), or S-B5-708 for an AHAS gene selection. The explants are inserted so that the callus at the bottom is just below the medium surface. Six to nine explants are placed in each Petri dish. Cultures will be maintained in the same condition as in the co-cultivation step.
The S-B5-605 medium comprises: 0.5×B5 salts, 3 mM MES, 2% sucrose, 1×B5 vitamins, 400 pg/ml Timentin, 0.8% Noble agar, and 3 pg/ml Glufosinate Ammonion (selection agent for Bar gene) at pH 5.8. The S-B5-708 medium comprises: 0.5×B5 salts, 3 mM MES, 2% sucrose, 1×B5 vitamins, 400 pg/ml Timentin, 0.8% Noble agar, and 1 μM Imazapyr (selection agent for AHAS gene) at pH5.8.

### Soybean Root Elongation/Growth

[0375] Two to three weeks after the root induction, transformed roots are formed on the cut ends of the explants. Elongated roots located on the tissues above the callus are removed during the transfer. For bar gene selection, explants are transferred to root elongation medium supplemented with 3 mg/l Glufosinate Ammonion and 400 mg/l Timentin without IBA (S-MS-607 medium) for further selection. For AHAS2 gene selection, explants are transferred to the same selection medium (S-B5-708 medium) for further selection. Transgenic roots proliferate well within one week in the medium and will be ready to be subcultured. The S-MS-607 medium comprises: 0.2×MS salts and B5 vitamins, 2% sucrose, 400 mg/l Timentin, and 3 mg/L Glufosinate Ammonion at pH5.8.

### Soybean Transgenic Root Harvested and Subcultured for Bioassay

[0376] Strong and white soybean roots are excised from the rooted explants and cultured in root growth medium supplemented with 200 mg/l Timentin (S-MS-606 medium) in either six-well plates or Petri plates. The main root tips are removed to induce secondary root growth. Cultures are maintained at room temperature under the dark condition. Each root event is subcultured into three different wells as replicates. Subcultured roots in each well should vigorously grow lateral roots. The S-MS-606 medium comprises: 0.2×MS salts and B5 vitamins, 2% sucrose, and 200 mg/l timentin at pH5.8.

### Nematode Assay

[0377] One to five days after subculturing, the roots are inoculated with surface sterilized nematode juveniles in multi-well plates for either gene of interest or promoter construct assay. As a control, soybean cultivar Williams 82 control vector and Jack control vector roots are used. The root cultures of each line that occupies at least half of the well are inoculated with surface-decontaminated race 3 of soybean cyst nematode (SCN) second stage juveniles (J2) at the level of 500 J2/well. The plates are then sealed and put back into the incubator at 25° C. in darkness. Several independent root lines are generated from each binary vector transformation and the lines will be used for bioassay. Four weeks after nematode inoculation, the cysts in each well will be counted.
As an example of the nomenclature used for the transgenic constructX, constructXL16 indicates Line 16 is generated from transformation with the PCP vector (constructX). Four weeks after nematode inoculation, the cyst number in each well is counted. The female index is a relationship where numbers of cysts are compared to the susceptible cultivar Williams82. For each transformation line, several replicated wells (number of replicates indicated by “n”,) the average number of cysts per well (MEAN), and the standard error (SE) values and female index (FI (%)) are determined.

### EXAMPLE 8

### Nematode Bioassay for Codon Optimized YNL090W (co) (SEQ ID NO: 762)

[0378] A bioassay to assess nematode resistance conferred by the polynucleotides described herein was performed using a rooted plant assay system disclosed in commonly owned copending U.S. Ser. No. 12/001,234. Transgenic roots are generated after transformation with the binary vectors described above. Multiple transgenic root lines are sub-cultured and inoculated with surface-decontaminated race 3 SCN second stage juveniles (J2) at the level of about 500 J2/well. Four weeks after nematode inoculation, the cyst number in each well is counted. For each transformation construct, the number of cysts per line is calculated to determine the average cyst count and standard error for the construct. The cyst count values for each transformation construct is compared to the cyst count values of an empty vector control tested in parallel to determine if the construct tested results in a reduction in cyst count. Bioassay results of the construct containing the genes described by SEQ ID NO: 762 resulted in a general trend of reduced soybean cyst nematode cyst count over many of the lines tested when operably linked to the SCN inducible promoter MtN3-like (SEQ ID NO: 680) as shown in Table 3 and Figure.

TABLE 3
Constructs generated for codon optimized YNL090W:

| Gene | Construct | Promoter | SCN bioassay results |
|---|---|---|---|
| YNL090W (co) | codon optimized | MtN3-like | reduced cyst |

YNL090W (co) SCN bioassay data indicate that 59% of the lines tested fall below the 95% confidence interval of the control mean. This indicates a general trend of reduced cyst count over the majority of lines tested compared to the control

[0379] According to the above disclosed examples the skilled person is able to clone all sequences disclosed in table I, preferably column 5.

### EXAMPLE 9

### Engineering Alfalfa Plants with Increased Resistance to Plant Disease, Preferably Pathogenic Fungi and/or Nematodes by Over-Expressing Stress Related Genes from Saccharomyces cerevisiae or E. coli or from Brassica napus, Glycine max, Zea mays or Oryza sativa for Example

[0380] A regenerating clone of alfalfa (Medicago sativa) is transformed using the method of (McKersie et al., 1999 Plant Physiol 119: 839-847). Regeneration and transformation of alfalfa is genotype dependent and therefore a regenerating plant is required. Methods to obtain regenerating plants have been described. For example, these can be selected from the cultivar Rangelander (Agriculture Canada) or any other commercial alfalfa variety as described by Brown DCW and A Atanassov (1985. Plant Cell Tissue Organ Culture 4: 111-112). Alternatively, the RA3 variety (University of Wisconsin) is selected for use in tissue culture (Walker et al., 1978 Am J Bot 65:654-659).
Petiole explants are cocultivated with an overnight culture of Agrobacterium tumefaciens C58C1 pMP90 (McKersie et al., 1999 Plant Physiol 119: 839-847) or LBA4404 containing a binary vector. Many different binary vector systems have been described for plant transformation (e.g. An, G. in Agrobacterium Protocols. Methods in Molecular Biology vol 44, pp 47-62, Gartland KMA and MR Davey eds. Humana Press, Totowa, N.J.). Many are based on the vector pBIN19 described by Bevan (Nucleic Acid Research. 1984. 12:8711-8721) that includes a plant gene expression cassette flanked by the left and right border sequences from the Ti plasmid of Agrobacterium tumefaciens. A plant gene expression cassette consists of at least two genes—a selection marker gene and a plant promoter regulating the transcription of the cDNA or genomic DNA of the trait gene. Various selection marker genes can be used including the Arabidopsis gene encoding a mutated acetohydroxy acid synthase (AHAS) enzyme (U.S. Pat. Nos. 5,673,666 and 6,225,105). Similarly, various promoters can be used to regulate the trait gene that provides constitutive, developmental, tissue or environmental regulation of gene transcription. In this example, the 34S promoter (GenBank Accession numbers M59930 and X16673) is used to provide constitutive expression of the trait gene.
The explants are cocultivated for 3 d in the dark on SH induction medium containing 288 mg/L Pro, 53 mg/L thioproline, 4.35 g/L K2SO4, and 100 μm acetosyringinone. The explants are washed in half-strength Murashige-Skoog medium (Murashige and Skoog, 1962) and plated on the same SH induction medium without acetosyringinone but with a suitable selection agent and suitable antibiotic to inhibit Agrobacterium growth. After several weeks, somatic embryos are transferred to BOi2Y development medium containing no growth regulators, no antibiotics, and 50 g/L sucrose. Somatic embryos are subsequently germinated on half-strength Murashige-Skoog medium. Rooted seedlings are transplanted into pots and grown in a greenhouse.
The T0 transgenic plants are propagated by node cuttings and rooted in Turface growth medium. The plants are defoliated and grown to a height of about 10 cm (approximately 2 weeks after defoliation). The plants are then subjected to plant disease, preferably pathogenic fungi and/or nematodes.
Tolerance of plant disease, preferably pathogenic fungi and/or nematodes are measured using methods as described in example 3 or 7. Plants that have tolerance to plant disease, preferably pathogenic fungi and/or nematodes have higher survival rates and biomass production including seed yield, photosynthesis and dry matter production than susceptible plants.

### EXAMPLE 10

### Engineering Ryegrass Plants with Increased Resistance to Plant Disease, Preferably Pathogenic Fungi and/or Nematodes by Over-Expressing Stress Related Genes from Saccharomyces cerevisiae or E. coli or from Brassica napus, Glycine max, Zea mays or Oryza sativa for Example

[0381] Seeds of several different ryegrass varieties may be used as explant sources for transformation, including the commercial variety Gunne available from Svalof Weibull seed company or the variety Affinity. Seeds are surface-sterilized sequentially with 1% Tween-20 for 1 minute, 100% bleach for 60 minutes, 3 rinses with 5 minutes each with de-ionized and distilled H2O, and then germinated for 3-4 days on moist, sterile filter paper in the dark. Seedlings are further sterilized for 1 minute with 1% Tween-20, 5 minutes with 75% bleach, and rinsed 3 times with ddH2O, 5 min each.
Surface-sterilized seeds are placed on the callus induction medium containing Murashige and Skoog basal salts and vitamins, 20 g/l sucrose, 150 mg/l asparagine, 500 mg/l casein hydrolysate, 3 g/l Phytagel, 10 mg/l BAP, and 5 mg/l dicamba. Plates are incubated in the dark at 25 C for 4 weeks for seed germination and embryogenic callus induction.
After 4 weeks on the callus induction medium, the shoots and roots of the seedlings are trimmed away, the callus is transferred to fresh media, maintained in culture for another 4 weeks, and then transferred to MSO medium in light for 2 weeks. Several pieces of callus (11-17 weeks old) are either strained through a 10 mesh sieve and put onto callus induction medium, or cultured in 100 ml of liquid ryegrass callus induction media (same medium as for callus induction with agar) in a 250 ml flask. The flask is wrapped in foil and shaken at 175 rpm in the dark at 23 C for 1 week. Sieving the liquid culture with a 40-mesh sieve collected the cells. The fraction collected on the sieve is plated and cultured on solid ryegrass callus induction medium for 1 week in the dark at 25° C. The callus is then transferred to and cultured on MS medium containing 1% sucrose for 2 weeks.
Transformation can be accomplished with either Agrobacterium of with particle bombardment methods. An expression vector is created containing a constitutive plant promoter and the cDNA of the gene in a pUC vector. The plasmid DNA is prepared from E. coli cells using with Qiagen kit according to manufacturer's instruction. Approximately 2 g of embryogenic callus is spread in the center of a sterile filter paper in a Petri dish. An aliquot of liquid MSO with 10 g/l sucrose is added to the filter paper. Gold particles (1.0 μm in size) are coated with plasmid DNA according to method of Sanford et al., 1993 and delivered to the embryogenic callus with the following parameters: 500 pg particles and 2 pg DNA per shot, 1300 psi and a target distance of 8.5 cm from stopping plate to plate of callus and 1 shot per plate of callus.
After the bombardment, calli are transferred back to the fresh callus development medium and maintained in the dark at room temperature for a 1-week period. The callus is then transferred to growth conditions in the light at 25° C. to initiate embryo differentiation with the appropriate selection agent, e.g. 250 nM Arsenal, 5 mg/l PPT or 50 mg/L kanamycin. Shoots resistant to the selection agent appeare and once rotted are transferred to soil.
Samples of the primary transgenic plants (T0) are analyzed by PCR to confirm the presence of T-DNA. These results are confirmed by Southern hybridization in which DNA is electrophoresed on a 1% agarose gel and transferred to a positively charged nylon membrane (Roche Diagnostics). The PCR DIG Probe Synthesis Kit (Roche Diagnostics) is used to prepare a digoxigenin-labelled probe by PCR, and used as recommended by the manufacturer.
Transgenic T0 ryegrass plants are propagated vegetatively by excising tillers. The transplanted tillers are maintained in the greenhouse for 2 months until well established. The shoots are defoliated and allowed to grow for 2 weeks.
Tolerance of plant disease, preferably pathogenic fungi and/or nematodes are measured using methods as described in example 3 or 7. Plants that have tolerance to plant disease, preferably pathogenic fungi and/or nematodes have higher survival rates and biomass production including seed yield, photosynthesis and dry matter production than susceptible plants.

### EXAMPLE 11

### Engineering rice Plants with Increased Resistance to Plant Disease, Preferably Pathogenic Fungi and/or Nematodes by Over-Expressing Stress Related Genes from Saccharomyces cerevisiae or E. coli or from Brassica napus, Glycine max, Zea mays or Oryza sativa for Example

### Rice Transformation

[0382] The Agrobacterium containing the expression vector of the invention is used to transform Oryza sativa plants. Mature dry seeds of the rice japonica cultivar Nipponbare are dehusked. Sterilization is carried out by incubating for one minute in 70% ethanol, followed by 30 minutes in 0.2% HgCl₂, followed by a 6 times 15 minutes wash with sterile distilled water. The sterile seeds are then germinated on a medium containing 2,4-D (callus induction medium). After incubation in the dark for four weeks, embryogenic, scutellum-derived calli are excised and propagated on the same medium. After two weeks, the calli are multiplied or propagated by subculture on the same medium for another 2 weeks. Embryogenic callus pieces are sub-cultured on fresh medium 3 days before co-cultivation (to boost cell division activity).
Agrobacterium strain LBA4404 containing the expression vector of the invention is used for co-cultivation. Agrobacterium is inoculated on AB medium with the appropriate antibiotics and cultured for 3 days at 28° C. The bacteria are then collected and suspended in liquid co-cultivation medium to a density (OD₆₀₀) of about 1. The suspension is then transferred to a Petri dish and the calli immersed in the suspension for 15 minutes. The callus tissues are then blotted dry on a filter paper and transferred to solidified, co-cultivation medium and incubated for 3 days in the dark at 25° C. Co-cultivated calli are grown on 2,4-D-containing medium for 4 weeks in the dark at 28° C. in the presence of a selection agent. During this period, rapidly growing resistant callus islands developed. After transfer of this material to a regeneration medium and incubation in the light, the embryogenic potential is released and shoots developed in the next four to five weeks. Shoots are excised from the calli and incubated for 2 to 3 weeks on an auxin-containing medium from which they are transferred to soil. Hardened shoots are grown under high humidity and short days in a greenhouse.
Approximately 35 independent T0 rice transformants are generated for one construct. The primary transformants are transferred from a tissue culture chamber to a greenhouse. After a quantitative PCR analysis to verify copy number of the T-DNA insert, only single copy transgenic plants that exhibit tolerance to the selection agent are kept for harvest of T1 seed. Seeds are then harvested three to five months after transplanting. The method yielded single locus transformants at a rate of over 50% (Aldemita and Hodges1996, Chan et al. 1993, Hiei et al. 1994).
Tolerance of plant disease, preferably pathogenic fungi and/or nematodes are measured using methods as described in example 3 or 7. Plants that have tolerance to plant disease, preferably pathogenic fungi and/or nematodes have higher survival rates and biomass production including seed yield, photosynthesis and dry matter production than susceptible plants.

### EXAMPLE 12

### Engineering Soybean Plants with Increased Resistance to Plant Disease, Preferably Pathogenic Fungi and/or Nematodes by Over-Expressing Stress Related Genes from Saccharomyces cerevisiae or E. coli or from Brassica napus, Glycine max, Zea mays or Oryza sativa for Example

[0383] Soybean is transformed according to the following modification of the method described in the Texas A&M patent U.S. Pat. No. 5,164,310. Several commercial soybean varieties are amenable to transformation by this method. The cultivar Jack (available from the Illinois Seed Foundation) is a commonly used for transformation. Seeds are sterilized by immersion in 70% (v/v) ethanol for 6 min and in 25% commercial bleach (NaOCl) supplemented with 0.1% (v/v) Tween for 20 min, followed by rinsing 4 times with sterile double distilled water. Seven-day seedlings are propagated by removing the radicle, hypocotyl and one cotyledon from each seedling. Then, the epicotyl with one cotyledon is transferred to fresh germination media in petri dishes and incubated at 25° C. under a 16-hr photoperiod (approx. 100 μE-m-2s-1) for three weeks. Axillary nodes (approx. 4 mm in length) were cut from 3-4 week-old plants. Axillary nodes are excised and incubated in Agrobacterium LBA4404 culture.

[0384] Many different binary vector systems have been described for plant transformation (e.g. An, G. in Agrobacterium Protocols. Methods in Molecular Biology vol 44, pp 47-62, Gartland K M A and M R Davey eds. Humana Press, Totowa, N.J.). Many are based on the vector pBIN19 described by Bevan (Nucleic Acid Research. 1984. 12:8711-8721) that includes a plant gene expression cassette flanked by the left and right border sequences from the Ti plasmid of Agrobacterium tumefaciens. A plant gene expression cassette consists of at least two genes—a selection marker gene and a plant promoter regulating the transcription of the cDNA or genomic DNA of the trait gene. Various selection marker genes can be used including the Arabidopsis gene encoding a mutated acetohydroxy acid synthase (AHAS) enzyme (U.S. Pat. Nos. 5,673,666 and 6,225,105). Similarly, various promoters can be used to regulate the trait gene to provide constitutive, developmental, tissue or environmental regulation of gene transcription. In this example, the 34S promoter (GenBank Accession numbers M59930 and X16673) can be used to provide constitutive expression of the trait gene.

After the co-cultivation treatment, the explants are washed and transferred to selection media supplemented with 500 mg/L timentin. Shoots are excised and placed on a shoot elongation medium. Shoots longer than 1 cm are placed on rooting medium for two to four weeks prior to transplanting to soil.
The primary transgenic plants (T0) are analyzed by PCR to confirm the presence of T-DNA. These results are confirmed by Southern hybridization in which DNA is electrophoresed on a 1% agarose gel and transferred to a positively charged nylon membrane (Roche Diagnostics). The PCR DIG Probe Synthesis Kit (Roche Diagnostics) is used to prepare a digoxigenin-labelled probe by PCR, and used as recommended by the manufacturer.
Tolerance of plant disease, preferably pathogenic fungi and/or nematodes are measured using methods as described in example 3 or 7. Plants that have tolerance to plant disease, preferably pathogenic fungi and/or nematodes have higher survival rates and biomass production including seed yield, photosynthesis and dry matter production than susceptible plants.

### EXAMPLE 13

### Engineering Rapeseed/Canola Plants with Increased Resistance to Plant Disease, Preferably Pathogenic Fungi and/or Nematodes by Over-Expressing Stress Related Genes from Saccharomyces cerevisiae or E. coli or from Brassica napus, Glycine max, Zea mays or Oryza sativa for Example

[0385] Cotyledonary petioles and hypocotyls of 5-6 day-old young seedlings are used as explants for tissue culture and transformed according to Babic et al. (1998, Plant Cell Rep 17: 183-188). The commercial cultivar Westar (Agriculture Canada) is the standard variety used for transformation, but other varieties can be used.
Agrobacterium tumefaciens LBA4404 containing a binary vector can be used for canola transformation. Many different binary vector systems have been described for plant transformation (e.g. An, G. in Agrobacterium Protocols. Methods in Molecular Biology vol 44, pp 47-62, Gartland K M A and M R Davey eds. Humana Press, Totowa, N.J.). Many are based on the vector pBIN19 described by Bevan (Nucleic Acid Research. 1984. 12:8711-8721) that includes a plant gene expression cassette flanked by the left and right border sequences from the Ti plasmid of Agrobacterium tumefaciens. A plant gene expression cassette consists of at least two genes—a selection marker gene and a plant promoter regulating the transcription of the cDNA or genomic DNA of the trait gene. Various selection marker genes can be used including the Arabidopsis gene encoding a mutated acetohydroxy acid synthase (AHAS) enzyme (U.S. Pat. Nos. 5,673,666 and 6,225,105). Similarly, various promoters can be used to regulate the trait gene to provide constitutive, developmental, tissue or environmental regulation of gene transcription. In this example, the 34S promoter (GenBank Accession numbers M59930 and X16673) can be used to provide constitutive expression of the trait gene.
Canola seeds are surface-sterilized in 70% ethanol for 2 min., and then in 30% Clorox with a drop of Tween-20 for 10 min, followed by three rinses with sterilized distilled water. Seeds are then germinated in vitro 5 days on half strength MS medium without hormones, 1% sucrose, 0.7% Phytagar at 23° C., 16 hr. light. The cotyledon petiole explants with the cotyledon attached are excised from the in vitro seedlings, and inoculated with Agrobacterium by dipping the cut end of the petiole explant into the bacterial suspension. The explants are then cultured for 2 days on MSBAP-3 medium containing 3 mg/l BAP, 3% sucrose, 0.7% Phytagar at 23° C., 16 hr light. After two days of co-cultivation with Agrobacterium, the petiole explants are transferred to MSBAP-3 medium containing 3 mg/l BAP, cefotaxime, carbenicillin, or timentin (300 mg/l) for 7 days, and then cultured on MSBAP-3 medium with cefotaxime, carbenicillin, or timentin and selection agent until shoot regeneration. When the shoots were 5-10 mm in length, they are cut and transferred to shoot elongation medium (MSBAP-0.5, containing 0.5 mg/l BAP). Shoots of about 2 cm in length are transferred to the rooting medium (MSO) for root induction.
Samples of the primary transgenic plants (T0) are analyzed by PCR to confirm the presence of T-DNA. These results are confirmed by Southern hybridization in which DNA is electrophoresed on a 1% agarose gel and transferred to a positively charged nylon membrane (Roche Diagnostics). The PCR DIG Probe Synthesis Kit (Roche Diagnostics) is used to prepare a digoxigenin-labelled probe by PCR, and used as recommended by the manufacturer.
Tolerance of plant disease, preferably pathogenic fungi and/or nematodes are measured using methods as described in example 3 or 7. Plants that have tolerance to plant disease, preferably pathogenic fungi and/or nematodes have higher survival rates and biomass production including seed yield, photosynthesis and dry matter production than susceptible plants.

### EXAMPLE 14

### Engineering Corn Plants with Increased Resistance to Plant Disease, Preferably Pathogenic Fungi and/or Nematodes by Over-Expressing Stress Related Genes from Saccharomyces cerevisiae or E. coli or from Brassica napus, Glycine max, Zea mays or Oryza sativa for Example

[0386] Transformation of maize (Zea Mays L.) is performed with a modification of the method described by Ishida et al. (1996. Nature Biotech 14745-50). Transformation is genotype-dependent in corn and only specific genotypes are amenable to transformation and regeneration. The inbred line A188 (University of Minnesota) or hybrids with A188 as a parent are good sources of donor material for transformation (Fromm et al. 1990 Biotech 8:833-839), but other genotypes can be used successfully as well. Ears are harvested from corn plants at approximately 11 days after pollination (DAP) when the length of immature embryos is about 1 to 1.2 mm. Immature embryos are co-cultivated with Agrobacterium tumefaciens that carry “super binary” vectors and transgenic plants are recovered through organogenesis. The super binary vector system of Japan Tobacco is described in WO patents WO94/00977 and WO95/06722. Vectors were constructed as described. Various selection marker genes can be used including the maize gene encoding a mutated acetohydroxy acid synthase (AHAS) enzyme (U.S. Pat. No. 6,025,541). Similarly, various promoters can be used to regulate the trait gene to provide constitutive, developmental, tissue or environmental regulation of gene transcription. In this example, the 34S promoter (GenBank Accession numbers M59930 and X16673) was used to provide constitutive expression of the trait gene.
Excised embryos are grown on callus induction medium, then maize regeneration medium, containing imidazolinone as a selection agent. The Petri plates are incubated in the light at 25° C. for 2-3 weeks, or until shoots develop. The green shoots are transferred from each embryo to maize rooting medium and incubated at 25° C. for 2-3 weeks, until roots develop. The rooted shoots are transplanted to soil in the greenhouse. T1 seeds are produced from plants that exhibit tolerance to the imidazolinone herbicides and which are PCR positive for the transgenes.
The T1 transgenic plants are then evaluated for their improved stress tolerance.
Tolerance of plant disease, preferably pathogenic fungi and/or nematodes are measured using methods as described in example 3 or 7. Plants that have tolerance to plant disease, preferably pathogenic fungi and/or nematodes have higher survival rates and biomass production including seed yield, photosynthesis and dry matter production than susceptible plants.

### EXAMPLE 15

### Engineering Wheat Plants with Increased Resistance to Plant Disease, Preferably Pathogenic Fungi and/or Nematodes by Over-Expressing Stress Related Genes from Saccharomyces cerevisiae or E. coli or from Brassica napus, Glycine max, Zea mays or Oryza sativa for Example

[0387] Transformation of wheat is performed with the method described by Ishida et al. (1996 Nature Biotech. 14745-50). The cultivar Bobwhite (available from CYMMIT, Mexico) is commonly used in transformation. Immature embryos are co-cultivated with Agrobacterium tumefaciens that carry “super binary” vectors, and transgenic plants are recovered through organogenesis. The super binary vector system of Japan Tobacco is described in WO patents WO94/00977 and WO95/06722. Vectors were constructed as described. Various selection marker genes can be used including the maize gene encoding a mutated acetohydroxy acid synthase (AHAS) enzyme (U.S. Pat. No. 6,025,541). Similarly, various promoters can be used to regulate the trait gene to provide constitutive, developmental, tissue or environmental regulation of gene transcription. In this example, the 34S promoter (GenBank Accession numbers M59930 and X16673) was used to provide constitutive expression of the trait gene.
After incubation with Agrobacterium, the embryos are grown on callus induction medium, then regeneration medium, containing imidazolinone as a selection agent. The Petri plates are incubated in the light at 25° C. for 2-3 weeks, or until shoots develop. The green shoots are transferred from each embryo to rooting medium and incubated at 25° C. for 2-3 weeks, until roots develop. The rooted shoots are transplanted to soil in the greenhouse. T1 seeds are produced from plants that exhibit tolerance to the imidazolinone herbicides and which are PCR positive for the transgenes.
The T1 transgenic plants are then evaluated for their improved stress tolerance according to the method described in the previous example 3. The T1 generation of single locus insertions of the T-DNA will segregate for the transgene in a 3:1 ratio. Those progeny containing one or two copies of the transgene are tolerant of the imidazolinone herbicide, and exhibit greater tolerance of biotic stress or drought stress than those progeny lacking the transgenes. Tolerant plants have higher survival rates and biomass production including seed yield, photosynthesis and dry matter production than susceptible plants. Homozygous T2 plants exhibited similar phenotypes.
Tolerance of plant disease, preferably pathogenic fungi and/or nematodes are measured using methods as described in example 3 or 7. Plants that have tolerance to plant disease, preferably pathogenic fungi and/or nematodes have higher survival rates and biomass production including seed yield, photosynthesis and dry matter production than susceptible plants

### EXAMPLE 16

### Identification of Identical and Heterologous Genes

[0388] Gene sequences can be used to identify identical or heterologous genes from cDNA or genomic libraries. Identical genes (e.g. full-length cDNA clones) can be isolated via nucleic acid hybridization using for example cDNA libraries. Depending on the abundance of the gene of interest, 100,000 up to 1,000,000 recombinant bacteriophages are plated and transferred to nylon membranes. After denaturation with alkali, DNA is immobilized on the membrane by e.g. UV cross linking. Hybridization is carried out at high stringency conditions. In aqueous solution, hybridization and washing is performed at an ionic strength of 1 M NaCl and a temperature of 68° C. Hybridization probes are generated by e.g. radioactive (³²P) nick transcription labeling (High Prime, Roche, Mannheim, Germany). Signals are detected by autoradiography.
Partially identical or heterologous genes that are related but not identical can be identified in a manner analogous to the above-described procedure using low stringency hybridization and washing conditions. For aqueous hybridization, the ionic strength is normally kept at 1 M NaCl while the temperature is progressively lowered from 68 to 42° C.
Isolation of gene sequences with homology (or sequence identity/similarity) only in a distinct domain of (for example 10-20 amino acids) can be carried out by using synthetic radio labeled oligonucleotide probes. Radiolabeled oligonucleotides are prepared by phosphorylation of the 5-prime end of two complementary oligonucleotides with T4 polynucleotide kinase. The complementary oligonucleotides are annealed and ligated to form concatemers. The double stranded concatemers are than radiolabeled by, for example, nick transcription. Hybridization is normally performed at low stringency conditions using high oligonucleotide concentrations.
Oligonucleotide hybridization solution:

### 6×SSC

[0389] 0.01 M sodium phosphate

### 1 mM EDTA (pH 8)

### 0.5% SDS

[0390] 100 μg/ml denatured salmon sperm DNA
0.1% nonfat dried milk
During hybridization, temperature is lowered stepwise to 5-10° C. below the estimated oligonucleotide Tₘ or down to room temperature followed by washing steps and autoradiography. Washing is performed with low stringency such as 3 washing steps using 4×SSC. Further details are described by Sambrook, J. et al., 1989, “Molecular Cloning: A Laboratory Manual,” Cold Spring Harbor Laboratory Press or Ausubel, F. M. et al., 1994, “Current Protocols in Molecular Biology,” John Wiley & Sons.

### EXAMPLE 17

### Identification of Homologous or Orthologous Genes by Screening Expression Libraries with Antibodies

[0391] c-DNA clones can be used to produce recombinant polypeptide for example in E. coli (e.g. Qiagen QIAexpress pQE system). Recombinant polypeptides are then normally affinity purified via Ni-NTA affinity chromatography (Qiagen). Recombinant polypeptides are then used to produce specific antibodies for example by using standard techniques for rabbit immunization. Antibodies are affinity purified using a Ni-NTA column saturated with the recombinant antigen as described by Gu et al., 1994, BioTechniques 17:257-262. The antibody can than be used to screen expression cDNA libraries to identify orthologous or heterologous genes via an immunological screening (Sambrook, J. et al., 1989, “Molecular Cloning: A Laboratory Manual,” Cold Spring Harbor Laboratory Press or Ausubel, F. M. et al., 1994, “Current Protocols in Molecular Biology”, John Wiley & Sons).

### EXAMPLE 18

### In Vivo Mutagenesis

[0392] In vivo mutagenesis of microorganisms can be performed by passage of plasmid (or other vector) DNA through E. coli or other microorganisms (e.g. Bacillus spp. or yeasts such as Saccharomyces cerevisiae) which are impaired in their capabilities to maintain the integrity of their genetic information. Typical mutator strains have mutations in the genes for the DNA repair system (e.g., mutHLS, mutD, mutT, etc.; for reference, see Rupp, W. D., 1996, DNA repair mechanisms, in: Escherichia coli and Salmonella, p. 2277-2294, ASM: Washington.) Such strains are well known to those skilled in the art. The use of such strains is illustrated, for example, in Greener, A. and Callahan, M., 1994, Strategies 7: 32-34. Transfer of mutated DNA molecules into plants is preferably done after selection and testing in microorganisms. Transgenic plants are generated according to various examples within the exemplification of this document.

### EXAMPLE 19

### Engineering Arabidopsis Plants with Increased Resistance to Plant Disease, Preferably Pathogenic Fungi and/or Nematodes by Over-Expressing Yield and Stress Related Protein Encoding Genes for Example from Brassica napus, Glycine max, Zea mays or Oryza sativa Using Stress-Inducible and Tissue-Specific Promoters

[0393] Transgenic Arabidopsis plants over-expressing stress related protein encoding genes from Brassica napus, Glycine max, Zea mays and Oryza sativa for example are created as described above to express the stress related protein encoding transgenes under the control of either a tissue-specific or stress-inducible promoter.
T2 generation plants are produced and treated with stress.
Tolerance of plant disease, preferably pathogenic fungi and/or nematodes are measured using methods as described in example 3 or 7. Plants that have tolerance to plant disease, preferably pathogenic fungi and/or nematodes have higher survival rates and biomass production including seed yield, photosynthesis and dry matter production than susceptible plants

### FIGURES

[0394] FIG. 1 Vector pMTX155 (SEQ ID NO: 1) used for used for cloning gene of interest for non-targeted expression.
FIG. 2 Vector VC-MME220-1 qcz (SEQ ID NO: 2) used for cloning gene of interest for non-targeted expression.
FIG. 3: Bioassay data for YNLO90W codon optimized:Numbers indicate SCN cyst count. Columns indicate the mean of SCN cyst count over all lines tested. Error bars indicate the 95% confidence interval of the mean.
FIG. 4: shows a table describing the constitutively overexpressed gene ID and the associated secondary screen line number, SEQ ID NOs, and bioassay data Figure number.
FIG. 5: shows the decreased root-nematode infestation rate observed in line 286 overexpressing the E. coli gene b2664. The table includes raw cyst count data for the MC24 control and line 286 plants tested.
FIG. 6: shows average cyst count with bars indicating the standard error of the mean.
FIG. 7: shows the decreased root-nematode infestation rate observed in line 37 overexpressing the yeast gene YNL090W. The table includes the raw data for the plants tested for both the MC24 control and line 37.
FIG. 8: shows average cyst count with bars indicating the standard error of the mean.
FIG. 9: shows the decreased root-nematode infestation rate observed in line 400 overexpressing the yeast gene YNL090W. The table includes the raw data for the plants tested for both the MC24 control and line 400.
FIG. 10: shows average cyst count with bars indicating the standard error of the mean.
FIG. 11: shows the decreased root-nematode infestation rate observed in line 401 overexpressing the yeast gene YNL090W. The table includes the raw data for the plants tested for both the MC24 control and line 401.
FIG. 12: shows average cyst count with bars indicating the standard error of the mean.
FIGS. 13 and 14 shows a table of describing homologs of SEQ ID NOs 1-14. The corresponding homologs identified, homolog organism, homolog SEQ ID NOs, and homolog percent identity to the lead sequence is shown.
FIG. 15: shows a matrix table of homologs identified corresponding to SEQ ID NO:2 (b2664). The grey shaded cells indicate the SEQ ID NO of the corresponding amino acid sequence. The cells with no shading indicate the global amino acid percent identity of the two SEQ ID NOs specific to the SEQ ID NOs that intersect on the x and y axis of the table in the corresponding cell.
FIG. 16: shows a matrix table of homologs identified corresponding to SEQ ID NO:10 (YNL090W). The grey shaded cells indicate the SEQ ID NO of the corresponding amino acid sequence. The cells with no shading indicate the global amino acid percent identity of the two SEQ ID NOs specific to the SEQ ID NOs that intersect on the x and y axis of the table in the corresponding cell.

TABLE IA
Nucleic acid sequence ID numbers

| | | | | | 5. | | |
|---|---|---|---|---|---|---|---|
| Appli- | 1. | 2. | 3. | 4. | Lead | 6. | 7. |
| cation | Hit | Project | Locus | Organism | SEQ ID | Target | SEQ IDs of Nucleic Acid Homologs |
| 1 | 1 | FR | B2664 | E. coli | 9 | non-targeted | 11, 13, 15, 17, 19, 21, 23, 25, 27, 29, 31, 33, 35, 37, 39, 41, 764, |
| | | | | | | | 766, 768 |
| 1 | 2 | FR | YNL090W | S. | 50 | non-targeted | 52, 54, 56, 58, 60, 62, 64, 66, 68, 70, 72, 74, 76, 78, 80, 82, 84, |
| | | | | cerevisiae | | | 86, 88, 90, 92, 94, 96, 98, 100, 102, 104, 106, 108, 110, 112, |
| | | | | | | | 114, 116, 118, 120, 122, 124, 126, 128, 130, 132, 134, 136, 138, |
| | | | | | | | 140, 142, 144, 146, 148, 150, 152, 154, 156, 158, 160, 162, 164, |
| | | | | | | | 166, 168, 170, 172, 174, 176, 178, 180, 182, 184, 186, 188, 190, |
| | | | | | | | 192, 194, 196, 198, 200, 202, 204, 206, 208, 210, 212, 214, 216, |
| | | | | | | | 218, 220, 222, 224, 226, 228, 230, 232, 234, 236, 238, 240, 242, |
| | | | | | | | 244, 246, 248, 250, 252, 254, 256, 258, 260, 262, 264, 266, 268, |
| | | | | | | | 270, 272, 274, 276, 278, 280, 282, 284, 286, 288, 290, 292, 294, |
| | | | | | | | 296, 298, 300, 302, 304, 306, 308, 310, 312, 314, 316, 318, 320, |
| | | | | | | | 322, 324, 326, 328, 330, 332, 334, 336, 338, 340, 342, 344, 346, |
| | | | | | | | 348, 350, 352, 354, 356, 358, 360, 362, 364, 366, 368, 370, 372, |
| | | | | | | | 374, 376, 378, 380, 382, 384, 386, 388, 390, 392, 394, 396, 398, |
| | | | | | | | 400, 402, 404, 406, 408, 410, 412, 414, 416, 418, 420, 422, 424, |
| | | | | | | | 426, 428, 430, 432, 434, 436, 438, 440, 442, 444, 446, 448, 450, |
| | | | | | | | 452, 454, 456, 458, 460, 462, 464, 466, 468, 470, 472, 474, 476, |
| | | | | | | | 478, 480, 482, 484, 486, 488, 490, 492, 494, 496, 498, 500, 502, |
| | | | | | | | 504, 506, 508, 510, 512, 514, 516, 518, 520, 522, 524, 526, 528, |
| | | | | | | | 530, 532, 534, 536, 538, 540, 542, 544, 546, 548, 550, 552, 554, |
| | | | | | | | 556, 558, 560, 562, 564, 566, 568, 570, 572, 574, 576, 578, 580, |
| | | | | | | | 582, 584, 586, 588, 590, 762, 770, 772, 774, 776 |

TABLE IB
Nucleic acid sequence ID numbers

| | | | | | 5. | | |
|---|---|---|---|---|---|---|---|
| Appli- | 1. | 2. | 3. | 4. | Lead | 6. | 7. |
| cation | Hit | Project | Locus | Organism | SEQ ID | Target | SEQ IDs of Nucleic Acid Homologs |
| 1 | 1 | FR | B2664 | E. coli | 9 | non-targeted | — |
| 1 | 2 | FR | YNL090W | S. | 50 | non-targeted | 592, 594, 596, 598, 600, 602, 604, 606, 608, 610, 612, 614, 616, |
| | | | | cerevisiae | | | 618, 620, 622, 624, 626, 628, 630, 632, 634, 636, 638, 640, 642, |
| | | | | | | | 644, 646, 648, 650, 652, 654, 656, 658, 660, 662, 664, 666, 668, |
| | | | | | | | 670, 672, 674, 676, 678, 680, 682, 684, 686, 688, 690, 692, 694, |
| | | | | | | | 696, 698, 700, 702, 704, 706, 708, 710, 712, 714, 716, 718, 720, |
| | | | | | | | 722, 724, 726, 728, 730, 732, 734, 736, 738, 740, 742, 744, 746, |
| | | | | | | | 748, 750, 752, 754 |

TABLE IIA
Amino acid sequence ID numbers

| | | | | | 5. | | |
|---|---|---|---|---|---|---|---|
| Appli- | 1. | 2. | 3. | 4. | Lead | 6. | 7. |
| cation | Hit | Project | Locus | Organism | SEQ ID | Target | SEQ IDs of Polypeptide Homologs |
| 1 | 1 | FR | B2664 | E. coli | 10 | non-targeted | 12, 14, 16, 18, 20, 22, 24, 26, 28, 30, 32, 34, 36, 38, 40, 42, 765, |
| | | | | | | | 767, 769 |
| 1 | 2 | FR | YNL090W | S. | 51 | non-targeted | 53, 55, 57, 59, 61, 63, 65, 67, 69, 71, 73, 75, 77, 79, 81, 83, 85, |
| | | | | cerevisiae | | | 87, 89, 91, 93, 95, 97, 99, 101, 103, 105, 107, 109, 111, 113, |
| | | | | | | | 115, 117, 119, 121, 123, 125, 127, 129, 131, 133, 135, 137, 139, |
| | | | | | | | 141, 143, 145, 147, 149, 151, 153, 155, 157, 159, 161, 163, 165, |
| | | | | | | | 167, 169, 171, 173, 175, 177, 179, 181, 183, 185, 187, 189, 191, |
| | | | | | | | 193, 195, 197, 199, 201, 203, 205, 207, 209, 211, 213, 215, 217, |
| | | | | | | | 219, 221, 223, 225, 227, 229, 231, 233, 235, 237, 239, 241, 243, |
| | | | | | | | 245, 247, 249, 251, 253, 255, 257, 259, 261, 263, 265, 267, 269, |
| | | | | | | | 271, 273, 275, 277, 279, 281, 283, 285, 287, 289, 291, 293, 295, |
| | | | | | | | 297, 299, 301, 303, 305, 307, 309, 311, 313, 315, 317, 319, 321, |
| | | | | | | | 323, 325, 327, 329, 331, 333, 335, 337, 339, 341, 343, 345, 347, |
| | | | | | | | 349, 351, 353, 355, 357, 359, 361, 363, 365, 367, 369, 371, 373, |
| | | | | | | | 375, 377, 379, 381, 383, 385, 387, 389, 391, 393, 395, 397, 399, |
| | | | | | | | 401, 403, 405, 407, 409, 411, 413, 415, 417, 419, 421, 423, 425, |
| | | | | | | | 427, 429, 431, 433, 435, 437, 439, 441, 443, 445, 447, 449, 451, |
| | | | | | | | 453, 455, 457, 459, 461, 463, 465, 467, 469, 471, 473, 475, 477, |
| | | | | | | | 479, 481, 483, 485, 487, 489, 491, 493, 495, 497, 499, 501, 503, |
| | | | | | | | 505, 507, 509, 511, 513, 515, 517, 519, 521, 523, 525, 527, 529, |
| | | | | | | | 531, 533, 535, 537, 539, 541, 543, 545, 547, 549, 551, 553, 555, |
| | | | | | | | 557, 559, 561, 563, 565, 567, 569, 571, 573, 575, 577, 579, 581, |
| | | | | | | | 583, 585, 587, 589, 591, 763, 771, 773, 775, 777 |

TABLE IIB
Amino acid sequence ID numbers

| | | | | | 5. | | |
|---|---|---|---|---|---|---|---|
| Appli- | 1. | 2. | 3. | 4. | Lead | 6. | 7. |
| cation | Hit | Project | Locus | Organism | SEQ ID | Target | SEQ IDs of Polypeptide Homologs |
| 1 | 1 | FR | B2664 | E. coli | 10 | non-targeted | — |
| 1 | 2 | FR | YNL090W | S. | 51 | non-targeted | 593, 595, 597, 599, 601, 603, 605, 607, 609, 611, 613, 615, 617, |
| | | | | cerevisiae | | | 619, 621, 623, 625, 627, 629, 631, 633, 635, 637, 639, 641, 643, |
| | | | | | | | 645, 647, 649, 651, 653, 655, 657, 659, 661, 663, 665, 667, 669, |
| | | | | | | | 671, 673, 675, 677, 679, 681, 683, 685, 687, 689, 691, 693, 695, |
| | | | | | | | 697, 699, 701, 703, 705, 707, 709, 711, 713, 715, 717, 719, 721, |
| | | | | | | | 723, 725, 727, 729, 731, 733, 735, 737, 739, 741, 743, 745, 747, |
| | | | | | | | 749, 751, 753, 755 |

TABLE III
Primer nucleic acid sequence ID numbers

| | | | | | 5. | | |
|---|---|---|---|---|---|---|---|
| Appli- | 1. | 2. | 3. | 4. | Lead | 6. | 7. |
| cation | Hit | Project | Locus | Organism | SEQ ID | Target | SEQ IDs of Primers |
| 1 | 1 | FR | B2664 | E. coli | 9 | non-targeted | 43, 44 |
| 1 | 2 | FR | YNL090W | S. | 50 | non-targeted | 756, 757 |
| | | | | cerevisiae | | | |

TABLE IV
Consensus amino acid sequence ID numbers

| | | | | | 5. | | |
|---|---|---|---|---|---|---|---|
| Appli- | 1. | 2. | 3. | 4. | Lead | 6. | 7. |
| cation | Hit | Project | Locus | Organism | SEQ ID | Target | SEQ IDs of Consensus/Pattern Sequences |
| 1 | 1 | FR | B2664 | E. coli | 10 | non-targeted | 45, 46, 47, 48, 49 |
| 1 | 2 | FR | YNL090W | S. | 51 | non-targeted | 758, 759, 760, 761 |
| | | | | cerevisiae | | | |

The application's sequence listing, which the Patent Office published only in electronic form, follows.

SEQUENCE LISTING (778 sequences)

SEQ ID NO: 1 - DNA, 8659 bp, Artificial Sequence
  plasmid pMTX155
agcttggacaatcagtaaattgaacggagaatattattcataaaaatacgatagtaacgggtgatatattcattagaatgaaccgaaaccggcggtaaggatctgagctacacatgctcaggttttttacaacgtgcacaacagaattgaaagcaaatatcatgcgatcataggcgtctcgcatatctcattaaagcagggcatgccggtcgagtcaaatctcggtgacgggcaggaccggacggggcggtaccggcaggctgaagtccagctgccagaaacccacgtcatgccagttcccgtgcttgaagccggccgcccgcagcatgccgcggggggcatatccgagcgcctcgtgcatgcgcacgctcgggtcgttgggcagcccgatgacagcgaccacgctcttgaagccctgtgcctccagggacttcagcaggtgggtgtagagcgtggagcccagtcccgtccgctggtggcggggggagacgtacacggtcgactcggccgtccagtcgtaggcgttgcgtgccttccaggggcccgcgtaggcgatgccggcgacctcgccgtccacctcggcgacgagccagggatagcgctcccgcagacggacgaggtcgtccgtccactcctgcggttcctgcggctcggtacggaagttgaccgtgcttgtctcgatgtagtggttgacgatggtgcagaccgccggcatgtccgcctcggtggcacggcggatgtcggccgggcgtcgttctgggctcatggtagactcgacggatccacgtgtggaagatatgaatttttttgagaaactagataagattaatgaatatcggtgttttggttttttcttgtggccgtctttgtttatattgagatttttcaaatcagtgcgcaagacgtgacgtaagtatccgagtcagtttttatttttctactaatttggtcgaagctttgggcggatcctctagagcagcttgccaacatggtggagcacgacactctcgtctactccaagaatatcaaagatacagtctcagaagaccaaagggctattgagacttttcaacaaagggtaatatcgggaaacctcctcggattccattgcccagctatctgtcacttcatcaaaaggacagtagaaaaggaaggtggcacctacaaatgccatcattgcgataaaggaaaggctatcgttcaagatgcctctgccgacagtggtcccaaagatggacccccacccacgaggagcatcgtggaaaaagaagacgttccaaccacgtcttcaaagcaagtggattgatgtgaacatggtggagcacgacactctcgtctactccaagaatatcaaagatacagtctcagaagaccaaagggctattgagacttttcaacaaagggtaatatcgggaaacctcctcggattccattgcccagctatctgtcacttcatcaaaaggacagtagaaaaggaaggtggcacctacaaatgccatcattgcgataaaggaaaggctatcgttcaagatgcctctgccgacagtggtcccaaagatggacccccacccacgaggagcatcgtggaaaaagaagacgttccaaccacgtcttcaaagcaagtggattgatgtgatatctccactgacgtaagggatgacgcacaatcccactatccttcgcaagacccttcctctatataaggaagttcatttcatttggagaggacagggtaccctggaattccagctgaccaccatggcaattcccggggatcagctcgaatttccccgatcgttcaaacatttggcaataaagtttcttaagattgaatcctgttgccggtcttgcgatgattatcatataatttctgttgaattacgttaagcatgtaataattaacatgtaatgcatgacgttatttatgagatgggtttttatgattagagtcccgcaattatacatttaatacgcgatagaaaacaaaatatagcgcgcaaactaggataaattatcgcgcgcggtgtcatctatgttactagatcgggaattggcatgcaagcttggcactggccgtcgttttacaacgtcgtgactgggaaaaccctggcgttacccaacttaatcgccttgcagcacatccccctttcgccagctggcgtaatagcgaagaggcccgcaccgatcgcccttcccaacagttgcgcagcctgaatggcgaatgctagagcagcttgagcttggatcagattgtcgtttcccgccttcagtttaaactatcagtgtttgacaggatatattggcgggtaaacctaagagaaaagagcgtttattagaataacggatatttaaaagggcgtgaaaaggtttatccgttcgtccatttgtatgtgcatgccaaccacagggttcccctcgggatcaaagtactttgatccaacccctccgctgctatagtgcagtcggcttctgacgttcagtgcagccgtcttctgaaaacgacatgtcgcacaagtcctaagttacgcgacaggctgccgccctgcccttttcctggcgttttcttgtcgcgtgttttagtcgcataaagtagaatacttgcgactagaaccggagacattacgccatgaacaagagcgccgccgctggcctgctgggctatgcccgcgtcagcaccgacgaccaggacttgaccaaccaacgggccgaactgcacgcggccggctgcaccaagctgttttccgagaagatcaccggcaccaggcgcgaccgcccggagctggccaggatgcttgaccacctacgccctggcgacgttgtgacagtgaccaggctagaccgcctggcccgcagcacccgcgacctactggacattgccgagcgcatccaggaggccggcgcgggcctgcgtagcctggcagagccgtgggccgacaccaccacgccggccggccgcatggtgttgaccgtgttcgccggcattgccgagttcgagcgttccctaatcatcgaccgcacccggagcgggcgcgaggccgccaaggcccgaggcgtgaagtttggcccccgccctaccctcaccccggcacagatcgcgcacgcccgcgagctgatcgaccaggaaggccgcaccgtgaaagaggcggctgcactgcttggcgtgcatcgctcgaccctgtaccgcgcacttgagcgcagcgaggaagtgacgcccaccgaggccaggcggcgcggtgccttccgtgaggacgcattgaccgaggccgacgccctggcggccgccgagaatgaacgccaagaggaacaagcatgaaaccgcaccaggacggccaggacgaaccgtttttcattaccgaagagatcgaggcggagatgatcgcggccgggtacgtgttcgagccgcccgcgcacgtctcaaccgtgcggctgcatgaaatcctggccggtttgtctgatgccaagctggcggcctggccggccagcttggccgctgaagaaaccgagcgccgccgtctaaaaaggtgatgtgtatttgagtaaaacagcttgcgtcatgcggtcgctgcgtatatgatgcgatgagtaaataaacaaatacgcaaggggaacgcatgaaggttatcgctgtacttaaccagaaaggcgggtcaggcaagacgaccatcgcaacccatctagcccgcgccctgcaactcgccggggccgatgttctgttagtcgattccgatccccagggcagtgcccgcgattgggcggccgtgcgggaagatcaaccgctaaccgttgtcggcatcgaccgcccgacgattgaccgcgacgtgaaggccatcggccggcgcgacttcgtagtgatcgacggagcgccccaggcggcggacttggctgtgtccgcgatcaaggcagccgacttcgtgctgattccggtgcagccaagcccttacgacatatgggccaccgccgacctggtggagctggttaagcagcgcattgaggtcacggatggaaggctacaagcggcctttgtcgtgtcgcgggcgatcaaaggcacgcgcatcggcggtgaggttgccgaggcgctggccgggtacgagctgcccattcttgagtcccgtatcacgcagcgcgtgagctacccaggcactgccgccgccggcacaaccgttcttgaatcagaacccgagggcgacgctgcccgcgaggtccaggcgctggccgctgaaattaaatcaaaactcatttgagttaatgaggtaaagagaaaatgagcaaaagcacaaacacgctaagtgccggccgtccgagcgcacgcagcagcaaggctgcaacgttggccagcctggcagacacgccagccatgaagcgggtcaactttcagttgccggcggaggatcacaccaagctgaagatgtacgcggtacgccaaggcaagaccattaccgagctgctatctgaatacatcgcgcagctaccagagtaaatgagcaaatgaataaatgagtagatgaattttagcggctaaaggaggcggcatggaaaatcaagaacaaccaggcaccgacgccgtggaatgccccatgtgtggaggaacgggcggttggccaggcgtaagcggctgggttgtctgccggccctgcaatggcactggaacccccaagcccgaggaatcggcgtgacggtcgcaaaccatccggcccggtacaaatcggcgcggcgctgggtgatgacctggtggagaagttgaaggccgcgcaggccgcccagcggcaacgcatcgaggcagaagcacgccccggtgaatcgtggcaagcggccgctgatcgaatccgcaaagaatcccggcaaccgccggcagccggtgcgccgtcgattaggaagccgcccaagggcgacgagcaaccagattttttcgttccgatgctctatgacgtgggcacccgcgatagtcgcagcatcatggacgtggccgttttccgtctgtcgaagcgtgaccgacgagctggcgaggtgatccgctacgagcttccagacgggcacgtagaggtttccgcagggccggccggcatggccagtgtgtgggattacgacctggtactgatggcggtttcccatctaaccgaatccatgaaccgataccgggaagggaagggagacaagcccggccgcgtgttccgtccacacgttgcggacgtactcaagttctgccggcgagccgatggcggaaagcagaaagacgacctggtagaaacctgcattcggttaaacaccacgcacgttgccatgcagcgtacgaagaaggccaagaacggccgcctggtgacggtatccgagggtgaagccttgattagccgctacaagatcgtaaagagcgaaaccgggcggccggagtacatcgagatcgagctagctgattggatgtaccgcgagatcacagaaggcaagaacccggacgtgctgacggttcaccccgattactttttgatcgatcccggcatcggccgttttctctaccgcctggcacgccgcgccgcaggcaaggcagaagccagatggttgttcaagacgatctacgaacgcagtggcagcgccggagagttcaagaagttctgtttcaccgtgcgcaagctgatcgggtcaaatgacctgccggagtacgatttgaaggaggaggcggggcaggctggcccgatcctagtcatgcgctaccgcaacctgatcgagggcgaagcatccgccggttcctaatgtacggagcagatgctagggcaaattgccctagcaggggaaaaaggtcgaaaaggtctctttcctgtggatagcacgtacattgggaacccaaagccgtacattgggaaccggaacccgtacattgggaacccaaagccgtacattgggaaccggtcacacatgtaagtgactgatataaaagagaaaaaaggcgatttttccgcctaaaactctttaaaacttattaaaactcttaaaacccgcctggcctgtgcataactgtctggccagcgcacagccgaagagctgcaaaaagcgcctacccttcggtcgctgcgctccctacgccccgccgcttcgcgtcggcctatcgcggccgctggccgctcaaaaatggctggcctacggccaggcaatctaccagggcgcggacaagccgcgccgtcgccactcgaccgccggcgcccacatcaaggcaccctgcctcgcgcgtttcggtgatgacggtgaaaacctctgacacatgcagctcccggagacggtcacagcttgtctgtaagcggatgccgggagcagacaagcccgtcagggcgcgtcagcgggtgttggcgggtgtcggggcgcagccatgacccagtcacgtagcgatagcggagtgtatactggcttaactatgcggcatcagagcagattgtactgagagtgcaccatatgcggtgtgaaataccgcacagatgcgtaaggagaaaataccgcatcaggcgctcttccgcttcctcgctcactgactcgctgcgctcggtcgttcggctgcggcgagcggtatcagctcactcaaaggcggtaatacggttatccacagaatcaggggataacgcaggaaagaacatgtgagcaaaaggccagcaaaaggccaggaaccgtaaaaaggccgcgttgctggcgtttttccataggctccgcccccctgacgagcatcacaaaaatcgacgctcaagtcagaggtggcgaaacccgacaggactataaagataccaggcgtttccccctggaagctccctcgtgcgctctcctgttccgaccctgccgcttaccggatacctgtccgcctttctcccttcgggaagcgtggcgctttctcatagctcacgctgtaggtatctcagttcggtgtaggtcgttcgctccaagctgggctgtgtgcacgaaccccccgttcagcccgaccgctgcgccttatccggtaactatcgtcttgagtccaacccggtaagacacgacttatcgccactggcagcagccactggtaacaggattagcagagcgaggtatgtaggcggtgctacagagttcttgaagtggtggcctaactacggctacactagaaggacagtatttggtatctgcgctctgctgaagccagttaccttcggaaaaagagttggtagctcttgatccggcaaacaaaccaccgctggtagcggtggtttttttgtttgcaagcagcagattacgcgcagaaaaaaaggatctcaagaagatcctttgatcttttctacggggtctgacgctcagtggaacgaaaactcacgttaagggattttggtcatgcattctaggtactaaaacaattcatccagtaaaatataatattttattttctcccaatcaggcttgatccccagtaagtcaaaaaatagctcgacatactgttcttccccgatatcctccctgatcgaccggacgcagaaggcaatgtcataccacttgtccgccctgccgcttctcccaagatcaataaagccacttactttgccatctttcacaaagatgttgctgtctcccaggtcgccgtgggaaaagacaagttcctcttcgggcttttccgtctttaaaaaatcatacagctcgcgcggatctttaaatggagtgtcttcttcccagttttcgcaatccacatcggccagatcgttattcagtaagtaatccaattcggctaagcggctgtctaagctattcgtatagggacaatccgatatgtcgatggagtgaaagagcctgatgcactccgcatacagctcgataatcttttcagggctttgttcatcttcatactcttccgagcaaaggacgccatcggcctcactcatgagcagattgctccagccatcatgccgttcaaagtgcaggacctttggaacaggcagctttccttccagccatagcatcatgtccttttcccgttccacatcataggtggtccctttataccggctgtccgtcatttttaaatataggttttcattttctcccaccagcttatataccttagcaggagacattccttccgtatcttttacgcagcggtatttttcgatcagttttttcaattccggtgatattctcattttagccatttattatttccttcctcttttctacagtatttaaagataccccaagaagctaattataacaagacgaactccaattcactgttccttgcattctaaaaccttaaataccagaaaacagctttttcaaagttgttttcaaagttggcgtataacatagtatcgacggagccgattttgaaaccgcggtgatcacaggcagcaacgctctgtcatcgttacaatcaacatgctaccctccgcgagatcatccgtgtttcaaacccggcagcttagttgccgttcttccgaatagcatcggtaacatgagcaaagtctgccgccttacaacggctctcccgctgacgccgtcccggactgatgggctgcctgtatcgagtggtgattttgtgccgagctgccggtcggggagctgttggctggctggtggcaggatatattgtggtgtaaacaaattgacgcttagacaacttaataacacattgcggacgtttttaatgtactgaattaacgccgaatta

SEQ ID NO: 2 - DNA, 9045 bp, Artificial Sequence
  plasmid VC-MME220-1qcz
agcttggacaatcagtaaattgaacggagaatattattcataaaaatacgatagtaacgggtgatatattcattagaatgaaccgaaaccggcggtaaggatctgagctacacatgctcaggttttttacaacgtgcacaacagaattgaaagcaaatatcatgcgatcataggcgtctcgcatatctcattaaagcagggcatgccggtcgagtcaaatctcggtgacgggcaggaccggacggggcggtaccggcaggctgaagtccagctgccagaaacccacgtcatgccagttcccgtgcttgaagccggccgcccgcagcatgccgcggggggcatatccgagcgcctcgtgcatgcgcacgctcgggtcgttgggcagcccgatgacagcgaccacgctcttgaagccctgtgcctccagggacttcagcaggtgggtgtagagcgtggagcccagtcccgtccgctggtggcggggggagacgtacacggtcgactcggccgtccagtcgtaggcgttgcgtgccttccaggggcccgcgtaggcgatgccggcgacctcgccgtccacctcggcgacgagccagggatagcgctcccgcagacggacgaggtcgtccgtccactcctgcggttcctgcggctcggtacggaagttgaccgtgcttgtctcgatgtagtggttgacgatggtgcagaccgccggcatgtccgcctcggtggcacggcggatgtcggccgggcgtcgttctgggctcatggtagactcgacggatccacgtgtggaagatatgaatttttttgagaaactagataagattaatgaatatcggtgttttggttttttcttgtggccgtctttgtttatattgagatttttcaaatcagtgcgcaagacgtgacgtaagtatccgagtcagtttttatttttctactaatttggtcgaagctttgggcggatcctctagattcgacggtatcgataagctcgcggatccctgaaagcgacgttggatgttaacatctacaaattgccttttcttatcgaccatgtacgtaagcgcttacgtttttggtggacccttgaggaaactggtagctgttgtgggcctgtggtctcaagatggatcattaatttccaccttcacctacgatggggggcatcgcaccggtgagtaatattgtacggctaagagcgaatttggcctgtaggatccctgaaagcgacgttggatgttaacatctacaaattgccttttcttatcgaccatgtacgtaagcgcttacgtttttggtggacccttgaggaaactggtagctgttgtgggcctgtggtctcaagatggatcattaatttccaccttcacctacgatggggggcatcgcaccggtgagtaatattgtacggctaagagcgaatttggcctgtaggatccctgaaagcgacgttggatgttaacatctacaaattgccttttcttatcgaccatgtacgtaagcgcttacgtttttggtggacccttgaggaaactggtagctgttgtgggcctgtggtctcaagatggatcattaatttccaccttcacctacgatggggggcatcgcaccggtgagtaatattgtacggctaagagcgaatttggcctgtaggatccgcgagctggtcaatcccattgcttttgaagcagctcaacattgatctctttctcgatcgagggagatttttcaaatcagtgcgcaagacgtgacgtaagtatccgagtcagtttttatttttctactaatttggtcgtttatttcggcgtgtaggacatggcaaccgggcctgaatttcgcgggtattctgtttctattccaactttttcttgatccgcagccattaacgacttttgaatagatacgctgacacgccaagcctcgctagtcaaaagtgtaccaaacaacgctttacagcaagaacggaatgcgcgtgacgctcgcggtgacgccatttcgccttttcagaaatggataaatagccttgcttcctattatatcttcccaaattaccaatacattacactagcatctgaatttcataaccaatctcgatacaccaaatcgaagatctcccgggttgctcttccatggcaatgattaattaacgaagagcaagagctcgaatttccccgatcgttcaaacatttggcaataaagtttcttaagattgaatcctgttgccggtcttgcgatgattatcatataatttctgttgaattacgttaagcatgtaataattaacatgtaatgcatgacgttatttatgagatgggtttttatgattagagtcccgcaattatacatttaatacgcgatagaaaacaaaatatagcgcgcaaactaggataaattatcgcgcgcggtgtcatctatgttactagatcgggaattggcatgcaagcttggcactggccgtcgttttacaacgtcgtgactgggaaaaccctggcgttacccaacttaatcgccttgcagcacatccccctttcgccagctggcgtaatagcgaagaggcccgcaccgatcgcccttcccaacagttgcgcagcctgaatggcgaatgctagagcagcttgagcttggatcagattgtcgtttcccgccttcagtttaaactatcagtgtttgacaggatatattggcgggtaaacctaagagaaaagagcgtttattagaataatcggatatttaaaagggcgtgaaaaggtttatccgttcgtccatttgtatgtgcatgccaaccacagggttcccctcgggatcaaagtactttgatccaacccctccgctgctatagtgcagtcggcttctgacgttcagtgcagccgtcttctgaaaacgacatgtcgcacaagtcctaagttacgcgacaggctgccgccctgcccttttcctggcgttttcttgtcgcgtgttttagtcgcataaagtagaatacttgcgactagaaccggagacattacgccatgaacaagagcgccgccgctggcctgctgggctatgcccgcgtcagcaccgacgaccaggacttgaccaaccaacgggccgaactgcacgcggccggctgcaccaagctgttttccgagaagatcaccggcaccaggcgcgaccgcccggagctggccaggatgcttgaccacctacgccctggcgacgttgtgacagtgaccaggctagaccgcctggcccgcagcacccgcgacctactggacattgccgagcgcatccaggaggccggcgcgggcctgcgtagcctggcagagccgtgggccgacaccaccacgccggccggccgcatggtgttgaccgtgttcgccggcattgccgagttcgagcgttccctaatcatcgaccgcacccggagcgggcgcgaggccgccaaggcccgaggcgtgaagtttggcccccgccctaccctcaccccggcacagatcgcgcacgcccgcgagctgatcgaccaggaaggccgcaccgtgaaagaggcggctgcactgcttggcgtgcatcgctcgaccctgtaccgcgcacttgagcgcagcgaggaagtgacgcccaccgaggccaggcggcgcggtgccttccgtgaggacgcattgaccgaggccgacgccctggcggccgccgagaatgaacgccaagaggaacaagcatgaaaccgcaccaggacggccaggacgaaccgtttttcattaccgaagagatcgaggcggagatgatcgcggccgggtacgtgttcgagccgcccgcgcacgtctcaaccgtgcggctgcatgaaatcctggccggtttgtctgatgccaagctggcggcctggccggccagcttggccgctgaagaaaccgagcgccgccgtctaaaaaggtgatgtgtatttgagtaaaacagcttgcgtcatgcggtcgctgcgtatatgatgcgatgagtaaataaacaaatacgcaaggggaacgcatgaaggttatcgctgtacttaaccagaaaggcgggtcaggcaagacgaccatcgcaacccatctagcccgcgccctgcaactcgccggggccgatgttctgttagtcgattccgatccccagggcagtgcccgcgattgggcggccgtgcgggaagatcaaccgctaaccgttgtcggcatcgaccgcccgacgattgaccgcgacgtgaaggccatcggccggcgcgacttcgtagtgatcgacggagcgccccaggcggcggacttggctgtgtccgcgatcaaggcagccgacttcgtgctgattccggtgcagccaagcccttacgacatatgggccaccgccgacctggtggagctggttaagcagcgcattgaggtcacggatggaaggctacaagcggcctttgtcgtgtcgcgggcgatcaaaggcacgcgcatcggcggtgaggttgccgaggcgctggccgggtacgagctgcccattcttgagtcccgtatcacgcagcgcgtgagctacccaggcactgccgccgccggcacaaccgttcttgaatcagaacccgagggcgacgctgcccgcgaggtccaggcgctggccgctgaaattaaatcaaaactcatttgagttaatgaggtaaagagaaaatgagcaaaagcacaaacacgctaagtgccggccgtccgagcgcacgcagcagcaaggctgcaacgttggccagcctggcagacacgccagccatgaagcgggtcaactttcagttgccggcggaggatcacaccaagctgaagatgtacgcggtacgccaaggcaagaccattaccgagctgctatctgaatacatcgcgcagctaccagagtaaatgagcaaatgaataaatgagtagatgaattttagcggctaaaggaggcggcatggaaaatcaagaacaaccaggcaccgacgccgtggaatgccccatgtgtggaggaacgggcggttggccaggcgtaagcggctgggttgcctgccggccctgcaatggcactggaacccccaagcccgaggaatcggcgtgagcggtcgcaaaccatccggcccggtacaaatcggcgcggcgctgggtgatgacctggtggagaagttgaaggccgcgcaggccgcccagcggcaacgcatcgaggcagaagcacgccccggtgaatcgtggcaagcggccgctgatcgaatccgcaaagaatcccggcaaccgccggcagccggtgcgccgtcgattaggaagccgcccaagggcgacgagcaaccagattttttcgttccgatgctctatgacgtgggcacccgcgatagtcgcagcatcatggacgtggccgttttccgtctgtcgaagcgtgaccgacgagctggcgaggtgatccgctacgagcttccagacgggcacgtagaggtttccgcagggccggccggcatggccagtgtgtgggattacgacctggtactgatggcggtttcccatctaaccgaatccatgaaccgataccgggaagggaagggagacaagcccggccgcgtgttccgtccacacgttgcggacgtactcaagttctgccggcgagccgatggcggaaagcagaaagacgacctggtagaaacctgcattcggttaaacaccacgcacgttgccatgcagcgtacgaagaaggccaagaacggccgcctggtgacggtatccgagggtgaagccttgattagccgctacaagatcgtaaagagcgaaaccgggcggccggagtacatcgagatcgagctagctgattggatgtaccgcgagatcacagaaggcaagaacccggacgtgctgacggttcaccccgattactttttgatcgatcccggcatcggccgttttctctaccgcctggcacgccgcgccgcaggcaaggcagaagccagatggttgttcaagacgatctacgaacgcagtggcagcgccggagagttcaagaagttctgtttcaccgtgcgcaagctgatcgggtcaaatgacctgccggagtacgatttgaaggaggaggcggggcaggctggcccgatcctagtcatgcgctaccgcaacctgatcgagggcgaagcatccgccggttcctaatgtacggagcagatgctagggcaaattgccctagcaggggaaaaaggtcgaaaaggtctctttcctgtggatagcacgtacattgggaacccaaagccgtacattgggaaccggaacccgtacattgggaacccaaagccgtacattgggaaccggtcacacatgtaagtgactgatataaaagagaaaaaaggcgatttttccgcctaaaactctttaaaacttattaaaactcttaaaacccgcctggcctgtgcataactgtctggccagcgcacagccgaagagctgcaaaaagcgcctacccttcggtcgctgcgctccctacgccccgccgcttcgcgtcggcctatcgcggccgctggccgctcaaaaatggctggcctacggccaggcaatctaccagggcgcggacaagccgcgccgtcgccactcgaccgccggcgcccacatcaaggcaccctgcctcgcgcgtttcggtgatgacggtgaaaacctctgacacatgcagctcccggagacggtcacagcttgtctgtaagcggatgccgggagcagacaagcccgtcagggcgcgtcagcgggtgttggcgggtgtcggggcgcagccatgacccagtcacgtagcgatagcggagtgtatactggcttaactatgcggcatcagagcagattgtactgagagtgcaccatatgcggtgtgaaataccgcacagatgcgtaaggagaaaataccgcatcaggcgctcttccgcttcctcgctcactgactcgctgcgctcggtcgttcggctgcggcgagcggtatcagctcactcaaaggcggtaatacggttatccacagaatcaggggataacgcaggaaagaacatgtgagcaaaaggccagcaaaaggccaggaaccgtaaaaaggccgcgttgctggcgtttttccataggctccgcccccctgacgagcatcacaaaaatcgacgctcaagtcagaggtggcgaaacccgacaggactataaagataccaggcgtttccccctggaagctccctcgtgcgctctcctgttccgaccctgccgcttaccggatacctgtccgcctttctcccttcgggaagcgtggcgctttctcatagctcacgctgtaggtatctcagttcggtgtaggtcgttcgctccaagctgggctgtgtgcacgaaccccccgttcagcccgaccgctgcgccttatccggtaactatcgtcttgagtccaacccggtaagacacgacttatcgccactggcagcagccactggtaacaggattagcagagcgaggtatgtaggcggtgctacagagttcttgaagtggtggcctaactacggctacactagaaggacagtatttggtatctgcgctctgctgaagccagttaccttcggaaaaagagttggtagctcttgatccggcaaacaaaccaccgctggtagcggtggtttttttgtttgcaagcagcagattacgcgcagaaaaaaaggatctcaagaagatcctttgatcttttctacggggtctgacgctcagtggaacgaaaactcacgttaagggattttggtcatgcattctaggtactaaaacaattcatccagtaaaatataatattttattttctcccaatcaggcttgatccccagtaagtcaaaaaatagctcgacatactgttcttccccgatatcctccctgatcgaccggacgcagaaggcaatgtcataccacttgtccgccctgccgcttctcccaagatcaataaagccacttactttgccatctttcacaaagatgttgctgtctcccaggtcgccgtgggaaaagacaagttcctcttcgggcttttccgtctttaaaaaatcatacagctcgcgcggatctttaaatggagtgtcttcttcccagttttcgcaatccacatcggccagatcgttattcagtaagtaatccaattcggctaagcggctgtctaagctattcgtatagggacaatccgatatgtcgatggagtgaaagagcctgatgcactccgcatacagctcgataatcttttcagggctttgttcatcttcatactcttccgagcaaaggacgccatcggcctcactcatgagcagattgctccagccatcatgccgttcaaagtgcaggacctttggaacaggcagctttccttccagccatagcatcatgtccttttcccgttccacatcataggtggtccctttataccggctgtccgtcatttttaaatataggttttcattttctcccaccagcttatataccttagcaggagacattccttccgtatcttttacgcagcggtatttttcgatcagttttttcaattccggtgatattctcattttagccatttattatttccttcctcttttctacagtatttaaagataccccaagaagctaattataacaagacgaactccaattcactgttccttgcattctaaaaccttaaataccagaaaacagctttttcaaagttgttttcaaagttggcgtataacatagtatcgacggagccgattttgaaaccgcggtgatcacaggcagcaacgctctgtcatcgttacaatcaacatgctaccctccgcgagatcatccgtgtttcaaacccggcagcttagttgccgttcttccgaatagcatcggtaacatgagcaaagtctgccgccttacaacggctctcccgctgacgccgtcccggactgatgggctgcctgtatcgagtggtgattttgtgccgagctgccggtcggggagctgttggctggctggtggcaggatatattgtggtgtaaacaaattgacgcttagacaacttaataacacattgcggacgtttttaatgtactgaattaacgccgaatta

SEQ ID NO: 3 - DNA, 768 bp, Artificial Sequence
  Big35S promoter
ctagagcagcttgccaacatggtggagcacgacactctcgtctactccaagaatatcaaagatacagtctcagaagaccaaagggctattgagacttttcaacaaagggtaatatcgggaaacctcctcggattccattgcccagctatctgtcacttcatcaaaaggacagtagaaaaggaaggtggcacctacaaatgccatcattgcgataaaggaaaggctatcgttcaagatgcctctgccgacagtggtcccaaagatggacccccacccacgaggagcatcgtggaaaaagaagacgttccaaccacgtcttcaaagcaagtggattgatgtgaacatggtggagcacgacactctcgtctactccaagaatatcaaagatacagtctcagaagaccaaagggctattgagacttttcaacaaagggtaatatcgggaaacctcctcggattccattgcccagctatctgtcacttcatcaaaaggacagtagaaaaggaaggtggcacctacaaatgccatcattgcgataaaggaaaggctatcgttcaagatgcctctgccgacagtggtcccaaagatggacccccacccacgaggagcatcgtggaaaaagaagacgttccaaccacgtcttcaaagcaagtggattgatgtgatatctccactgacgtaagggatgacgcacaatcccactatccttcgcaagacccttcctctatataaggaagttcatttcatttggagaggacagggtaccc

SEQ ID NO: 4 - DNA, 1112 bp, Artificial Sequence
  super promoter
ggatccctgaaagcgacgttggatgttaacatctacaaattgccttttcttatcgaccatgtacgtaagcgcttacgtttttggtggacccttgaggaaactggtagctgttgtgggcctgtggtctcaagatggatcattaatttccaccttcacctacgatggggggcatcgcaccggtgagtaatattgtacggctaagagcgaatttggcctgtaggatccctgaaagcgacgttggatgttaacatctacaaattgccttttcttatcgaccatgtacgtaagcgcttacgtttttggtggacccttgaggaaactggtagctgttgtgggcctgtggtctcaagatggatcattaatttccaccttcacctacgatggggggcatcgcaccggtgagtaatattgtacggctaagagcgaatttggcctgtaggatccctgaaagcgacgttggatgttaacatctacaaattgccttttcttatcgaccatgtacgtaagcgcttacgtttttggtggacccttgaggaaactggtagctgttgtgggcctgtggtctcaagatggatcattaatttccaccttcacctacgatggggggcatcgcaccggtgagtaatattgtacggctaagagcgaatttggcctgtaggatccgcgagctggtcaatcccattgcttttgaagcagctcaacattgatctctttctcgatcgagggagatttttcaaatcagtgcgcaagacgtgacgtaagtatccgagtcagtttttatttttctactaatttggtcgtttatttcggcgtgtaggacatggcaaccgggcctgaatttcgcgggtattctgtttctattccaactttttcttgatccgcagccattaacgacttttgaatagatacgctgacacgccaagcctcgctagtcaaaagtgtaccaaacaacgctttacagcaagaacggaatgcgcgtgacgctcgcggtgacgccatttcgccttttcagaaatggataaatagccttgcttcctattatatcttcccaaattaccaatacattacactagcatctgaatttcataaccaatctcgatacaccaaatcga

SEQ ID NO: 5 - DNA, 19 bp, Artificial Sequence
  adapter sequence added to gene specific primers for cloning purposes
ggaattccagctgaccacc

SEQ ID NO: 6 - DNA, 20 bp, Artificial Sequence
  adapter sequence added to gene specific primers for cloning purposes
gatccccgggaattgccatg

SEQ ID NO: 7 - DNA, 10 bp, Artificial Sequence
  adapter sequence added to gene specific primers for cloning purposes
ttgctcttcc

SEQ ID NO: 8 - DNA, 10 bp, Artificial Sequence
  adapter sequence added to gene specific primers for cloning purposes
ttgctcttcg

SEQ ID NO: 9 - DNA, 681 bp, Escherichia coli
  CDS (1)..(681): transl_table=11
atgatcaggagtcacaccatgaccattacgtctctggatggctatcgctggctgaagaacgatattattcgcggtaattttcaaccggatgaaaaattacgaatgagtttgctgacatcgcgttatgcacttggcgttgggccgttacgggaagctctttcgcaactggtggcggaacggctggtcacggtggtgaatcaaaaagggtatcgggtggcgtctatgtcagagcaggagctgctcgatattttcgacgcccgcgccaatatggaagcgatgttagtgagtctggcgattgcccgcggtggcgatgagtgggaggcagacgttctcgcaaaagcgcatctgctgagtaagcttgaggcctgtgacgccagcgagaaaatgcttgatgagtgggatctgcgtcatcaggcgtttcatacggcaattgtggcgggctgtggttctcactatttgctgcaaatgcgtgaacggttgtttgatctggcggcgcgttatcgatttatctggctgcggcgaacggtgctttcggtggaaatgctggaggataaacacgatcagcaccagaccctgactgcggcggtactggcgcgagataccgcgcgcgccagtgagttaatgcgccagcatttactgacgccaattcccattatccagcaggcgatggctggcaattaa

SEQ ID NO: 10 - protein, 226 aa, Escherichia coli
MIRSHTMTITSLDGYRWLKNDIIRGNFQPDEKLRMSLLTSRYALGVGPLREALSQLVAERLVTVVNQKGYRVASMSEQELLDIFDARANMEAMLVSLAIARGGDEWEADVLAKAHLLSKLEACDASEKMLDEWDLRHQAFHTAIVAGCGSHYLLQMRERLFDLAARYRFIWLRRTVLSVEMLEDKHDQHQTLTAAVLARDTARASELMRQHLLTPIPIIQQAMAGN

SEQ ID NO: 11 - DNA, 678 bp, Salmonella typhimurium
  Salmonella typhimurium LT2
  CDS (1)..(678): transl_table=11
atgaccgccctttcccaaccgacggccatagatggctatcgctggcttaaaaatgacattattcgcggcacttatcagccggatgagaaactgcggatgagtttattaaccgcccgctatgcgctcggcgtagggccgctgcgtgaggcgctgtcgcaactggtggcggaacggctggtcaccgtggtgaatcaaaaaggctatcgcgtggcatccatgtcagaggcggaactcctcgatatttttgacgcgcgcgccaatatggaagcgatgctggtacgcctggcgattgaacgcggcgatgatgcgtgggaggcggagatcctggcgcgagcgcatatgctcagcaaactggaagccagcgatgccagtgaacatatgctcgatgaatgggatcagcgccaccaggcgttccattccgccattgtcgccgggtgcggctcccactatctgctacagatgcgcgaacgcttatttgacctggcggcccgctaccgctttatttggttacgtgaaaccgttctgtccgtcgagatgctggaagataaacatatccagcatcacacgctaaccgaagcgatactggcgcgcgaggcggcacgcgccagcgaattaatgcgtcagcatttgctgacgccgattcccattattcgccaggcgatggcagggaaaatgtag

SEQ ID NO: 12 - protein, 225 aa, Salmonella typhimurium
  Salmonella typhimurium LT2
MTALSQPTAIDGYRWLKNDIIRGTYQPDEKLRMSLLTARYALGVGPLREALSQLVAERLVTVVNQKGYRVASMSEAELLDIFDARANMEAMLVRLAIERGDDAWEAEILARAHMLSKLEASDASEHMLDEWDQRHQAFHSAIVAGCGSHYLLQMRERLFDLAARYRFIWLRETVLSVEMLEDKHIQHHTLTEAILAREAARASELMRQHLLTPIPIIRQAMAGKM

SEQ ID NO: 13 - DNA, 663 bp, Shigella flexneri
  Shigella flexneri 2a str. 301
  CDS (1)..(663): transl_table=11
atgaccattacgtctctggatggctatcgctggctgaagaacgatattattcgcggtaattttcaaccggatgaaaaattacggatgagtttactgacatcgcgttatgcacttggcgttgggccgttgcaggaagcactttctcaactggtggcggaacggctggtcacggtggtgaatcaaaaagggtatcgggtggcgtctatgtcagagcaggagctgctcgatattttcgacgcccgcgccaatatggaagcgatgctggtcagtctggcgattgcccgcggtggcgatgaatgggaggcagacgttctcgcaaaagcgcatctgctcagtaagctggaagcctgtgacgccagcgagaaaatgcttgatgagtgggatctgcgtcatcaggcgtttcatacagcaattgtggcgggctgtggttctcactatttgctgcaaatgcgtgaacggttgtttgatctggcggcgcgttatcgatttatctggctgcggcgaacggtgctttcggtggaaatgctggaggataaacacgatcagcaccagaccctgactgcggcggtactgccgcgagatacagcgcgcgccagtgagttaatgcgccagcatttactgacgccaattcccattatccagcaggcgatggctggcaattaa

SEQ ID NO: 14 - protein, 220 aa, Shigella flexneri
  Shigella flexneri 2a str. 301
MTITSLDGYRWLKNDIIRGNFQPDEKLRMSLLTSRYALGVGPLQEALSQLVAERLVTVVNQKGYRVASMSEQELLDIFDARANMEAMLVSLAIARGGDEWEADVLAKAHLLSKLEACDASEKMLDEWDLRHQAFHTAIVAGCGSHYLLQMRERLFDLAARYRFIWLRRTVLSVEMLEDKHDQHQTLTAAVLPRDTARASELMRQHLLTPIPIIQQAMAGN

SEQ ID NO: 15 - DNA, 696 bp, Pseudomonas putida
  Pseudomonas putida KT2440
  CDS (1)..(696): transl_table=11
ttggaagcgctcgccccccgacaaaactcagcattcagcgggtatgagaggctcaagaaggacatcatccgcggggtgttcaagcccggtgaaaagctgttgatgagcaccctcaaggaacgctacgacctgggtgtgggcccgctgcgcgaagcactgtcgcaactggtggccgagcacctggtcaacgcgatcagccagaaaggctaccgggtagcgcccatgtcgctggatgagatgaacgacatctacgacgcccgcgccaacctggaagcgatgatcattgccttggccatcgagcgcggcgatgacgcctgggaggcatcggtgctggcccactcgcatacattggccaaggtggtggaagtaaaaacccgcgagcagcggctggatgtgtgggacgagcggcacaaggcgttccatactgccattgcctcgggctgcggctccaagcacctgctgcaggcacgcacctacctgttcgaccaggccgagcgctaccgccacctgtggctgacgcagacggtgttttccgaagaggcgctggcgctcaagcgccaggagcatgcggcactggtcgaggtgatcctcgcccgggatgccaaaaccgccagcgccatgatgcgctcgcacctgatgacaccggtaccgatcattgcgcagatcatgcacgccgaaggcatcggtgcccgctag

SEQ ID NO: 16 - protein, 231 aa, Pseudomonas putida
  Pseudomonas putida KT2440
MEALAPRQNSAFSGYERLKKDIIRGVFKPGEKLLMSTLKERYDLGVGPLREALSQLVAEHLVNAISQKGYRVAPMSLDEMNDIYDARANLEAMIIALAIERGDDAWEASVLAHSHTLAKVVEVKTREQRLDVWDERHKAFHTAIASGCGSKHLLQARTYLFDQAERYRHLWLTQTVFSEEALALKRQEHAALVEVILARDAKTASAMMRSHLMTPVPIIAQIMHAEGIGAR

SEQ ID NO: 17 - DNA, 663 bp, Escherichia coli
  Escherichia coli CFT073
  CDS (1)..(663): transl_table=11
atgaccattacctctctggatggctatcgctggctgaagaacgatattattcgcggcaattttcagccggatgaaaaattacggatgagtttgctgacatcgcgttatgcacttggcgtcggaccgttgcgggaagcgctttcgcaactggtggcagaacgactggtcacggtggtgaatcaaaaagggtatcgggtggcgtctatgtcagagcaggagctgctcgatattttcgacgcccgcgccaatatggaagcgatgctggtgagtctggcgattgcccgcggtggcgatgaatgggaggcagacgttctcgcaaaagcgcatctgctcagtaagcttgaggcctgtgacgccagtgagaaaatgcttgatgagtgggatctgcgtcatcaggcgtttcatactgcaattgtggcgggctgtggttcttactatttgctgcaaatgcgtgaacggttgtttgatctggcagcgcgttatcgatttatctggctgcggcgaacagtgctttcggtggaaatgctggaagataaacacgatcagcaccagaccctgactgcggcggtactggcgcgagataccgcgcgcgccagtgagttaatgcgccagcatttactgacgccaattcccattatccagcaggcgatggctggcaattaa

SEQ ID NO: 18 - protein, 220 aa, Escherichia coli
  Escherichia coli CFT073
MTITSLDGYRWLKNDIIRGNFQPDEKLRMSLLTSRYALGVGPLREALSQLVAERLVTVVNQKGYRVASMSEQELLDIFDARANMEAMLVSLAIARGGDEWEADVLAKAHLLSKLEACDASEKMLDEWDLRHQAFHTAIVAGCGSYYLLQMRERLFDLAARYRFIWLRRTVLSVEMLEDKHDQHQTLTAAVLARDTARASELMRQHLLTPIPIIQQAMAGN

SEQ ID NO: 19 - DNA, 711 bp, Rhodopseudomonas palustris
  Rhodopseudomonas palustris CGA009
  CDS (1)..(711): transl_table=11
atgatgaaactcgccgctgccccagacccggagatcgccaccagcgacacgctcagcgagcgcgcggccaacctgctcgagcgcgatatcgtctcgggcgagctgccgccgggatcgaagctcggcatcgtcgagctggcgcgccgctacgagatcggcgccacgccgctgcgcgaggggctgtcgcggctgacgtcgcgcgggctgatcgtcgcgatcgggcagcgcggcttccgcgtcgccgaagtcagccgcgacgatctgctcgacatcacgcggatgcggacggtgatcgaacgcgaggcgctacggctcgcgatcgacaatggcggcgacgcctgggaggccgggatcgtcgcggcgttgcaccagatgcagcgctacgtggagcgcaacgccaacgatttccgagaaggcgcgccggagttcgatcggctgcacaaggcgtttcacaccagcctgcttgcagcctgcggctctcctcgcctgctggcagcgcattcggacctgtacgatcaggcctatcgctatcggcgggtgatgatgcgcagcattgaaagcggccggtacttcatcgccgcgcatcgcgaattggccgacctcgtgctcgcacgcgacgccgaggccgcagagaccaagctcgaccagcatctgcgcgcgacgctgactaccgtctatccgccgggcaagagccagccgccatcccgctga

SEQ ID NO: 20 - protein, 236 aa, Rhodopseudomonas palustris
  Rhodopseudomonas palustris CGA009
MMKLAAAPDPEIATSDTLSERAANLLERDIVSGELPPGSKLGIVELARRYEIGATPLREGLSRLTSRGLIVAIGQRGFRVAEVSRDDLLDITRMRTVIEREALRLAIDNGGDAWEAGIVAALHQMQRYVERNANDFREGAPEFDRLHKAFHTSLLAACGSPRLLAAHSDLYDQAYRYRRVMMRSIESGRYFIAAHRELADLVLARDAEAAETKLDQHLRATLTTVYPPGKSQPPSR

SEQ ID NO: 21 - DNA, 693 bp, Klebsiella pneumoniae
  Klebsiella pneumoniae subsp. pneumoniae MGH 78578
  CDS (1)..(693): transl_table=11
atgaccgccattccccaggcgacggccattgacggataccgttggttaaaaaacgacatcatccgcggggtttaccaccccgatgagaagctgcggatgagcctgctgacgtcgcgctatggcctgggggtcggtccgctgcgcgaggcgctttcgcaactggtggccgagcggctggtgacggtggtcaatcagaaaggctatcgggtggcgcccatgtcggaacaggagcttctcgatatcttcgacgcgcgcgccaacatggaggccatgctggtgcgtctcgccattgaacgcggcggcgacgagtgggaagccgagctgctggcccgcgcccatctgctcaacaagctggagtcgtgcgaagcgagtgagcacctactcgatgaatgggaccagcgccatcaggcgtttcacaccgccatcgtcgccggctgcggttcgcagtatctgctgcagatgcgcgaacggctgttcgatctggcggcgcgctaccgcttcatctggctgcgcaccaccgtgctgtcggtggagatgctggaagataagcatgtccagcatcagaccctggtggacgctattctggcgcgcgacgccgaacaggccagcgcgctgatgcgcgagcacttactgactccgatcccgattattcaacaggcgatggctggcaagctgtcgccgcaggcagggtga

SEQ ID NO: 22 - protein, 230 aa, Klebsiella pneumoniae
  Klebsiella pneumoniae subsp. pneumoniae MGH 78578
MTAIPQATAIDGYRWLKNDIIRGVYHPDEKLRMSLLTSRYGLGVGPLREALSQLVAERLVTVVNQKGYRVAPMSEQELLDIFDARANMEAMLVRLAIERGGDEWEAELLARAHLLNKLESCEASEHLLDEWDQRHQAFHTAIVAGCGSQYLLQMRERLFDLAARYRFIWLRTTVLSVEMLEDKHVQHQTLVDAILARDAEQASALMREHLLTPIPIIQQAMAGKLSPQAG

SEQ ID NO: 23 - DNA, 732 bp, Salmonella enterica
  Salmonella enterica subsp. arizonae serovar 62:z4,z23:--
  CDS (1)..(732): transl_table=11
atgcccggcgccagccgggatgcttctcaggagaaaaagatgaccgcgctttcccaaccgacggccatagatggatatcgctggcttaaaaatgacattattcgcgggacttatcagccggatgaaaaactgcggatgagtttattaacctcccgctatgcgctcggcgtaggaccgctacgcgaggcgctgtcacaactggtggcggaacggctggtcaccgtggtgaatcaaaaaggctatcgtgtggcgtccatgtcagagatggaacttctcgatatttttgacgcgcgcgccaatatggaagcaatgctggtgcgtctggcgattgaacgcggcgatgatgcgtgggaggcggagatcctggcccgagcgcatatgctcagtaaactggaagccagcgatgccagtgaacatatgctcgatgaatgggatcagcgccaccaggcgtttcattccgcaattgtcgccggttgcggctcccactacctgctacagatgcgcgaacggttattcgatctggcggcgcgctaccgctttatttggttacgtgaaaccgtcctgtctgtcgagatgctggaagataaacatatccagcatcacacgctgacagaagcgattctggcgcgcgaggcggcacgcgccagcgagttaatgcgtcagcatttgctgacgccgattcccattattcgtcaggcgatgacgggaaaaatgaagccaggagcggcctga

SEQ ID NO: 24 - protein, 243 aa, Salmonella enterica
  Salmonella enterica subsp. arizonae serovar 62:z4,z23:--
MPGASRDASQEKKMTALSQPTAIDGYRWLKNDIIRGTYQPDEKLRMSLLTSRYALGVGPLREALSQLVAERLVTVVNQKGYRVASMSEMELLDIFDARANMEAMLVRLAIERGDDAWEAEILARAHMLSKLEASDASEHMLDEWDQRHQAFHSAIVAGCGSHYLLQMRERLFDLAARYRFIWLRETVLSVEMLEDKHIQHHTLTEAILAREAARASELMRQHLLTPIPIIRQAMTGKMKPGAA

SEQ ID NO: 25 - DNA, 696 bp, Pseudomonas putida
  Pseudomonas putida GB-1
  CDS (1)..(696): transl_table=11
ttggaagcgctcgccccccgacaaaactcagcattcagcgggtatgagaggctcaagaaggacatcatccgcggcgtgttcaaacccggtgaaaaactgttgatgagcgccctcaaggaacgctacgacctgggcgtgggcccgctgcgcgaagcactgtcacaactggtggcagagcacctggtcaacgcgataagccagaaaggctaccgggtggcgcccatgtcgctggacgagatgaacgacatctatgatgcccgcgccaacctggaagcgatgatcatcgccctggccatcgaacgcggcgacgacgcctgggaggcctcggtgctggcccactcgcacaccctggccaaagtggtggaggtgaaaacccgtgaacagcgcctggacgtgtgggacgaacggcacaaggcgttccataccgccatcgcctcgggctgcggctccaagcacctgctgcaagcgcgcacctacctgttcgaccaggccgaacgctaccgccatctgtggctgacgcagacggtgttttccgagcaggcgctggagctcaagcgccaggagcatgcagcgctggtcgaggtgattctcgcccgtgatgccaagcgcgccagcgccatgatgcgctcgcacctgatgaccccggtgccgatcattgcgcagatcatgcatgctgaaggtatcggcgcacgctag

SEQ ID NO: 26 - protein, 231 aa, Pseudomonas putida
  Pseudomonas putida GB-1
MEALAPRQNSAFSGYERLKKDIIRGVFKPGEKLLMSALKERYDLGVGPLREALSQLVAEHLVNAISQKGYRVAPMSLDEMNDIYDARANLEAMIIALAIERGDDAWEASVLAHSHTLAKVVEVKTREQRLDVWDERHKAFHTAIASGCGSKHLLQARTYLFDQAERYRHLWLTQTVFSEQALELKRQEHAALVEVILARDAKRASAMMRSHLMTPVPIIAQIMHAEGIGAR

SEQ ID NO: 27 - DNA, 783 bp, Ralstonia eutropha
  Ralstonia eutropha JMP134
  CDS (1)..(783): transl_table=11
gtgccagccaaacccgccaagcccgtcaccattgatactgccgtccaggagtcgccggacctcggcgggcgcacgtgggcatccgtcctcgaacaggcggttcgcgaagacatcatcagcgggcgtctgccggcgggcagcaaactgcgcctgaaggaactggccgagcattaccaggccggtgtgatcccactgcgcgaggccctgtcccggttgtgcacgaccggctttgtactggcaatcgaccagaagggcttccgggtggcggagctgtcccccgaggaattgctcgacgtcacgcgcgtgcgccagcagatagaatgccaggctctgcgcgacgccatcaggctcgcggacatcgcttgggaaagcgatgtggtagcggcgcaccatcgcctgacgcgcatcccgatggtgttgcgcgaccaacgcggcgcgctgaacccagagtgggaagccgcacatgtggcttttcacgatgcgctgatctggggctgccactccccatggctgcggcggttctcggccgtactgcgcgaccagacggcgcgctatcggttcctctcgctcgccgtacccaaggccgaacggagccgggacgtggcggcggaacacgaggccatcgtcagcgccgtggtcgcacgcaacgctgaccgcgcctgcaaactgctgtcggaccatttccagcacaccaccgacctggtgctccagtaccttgcccggcagaaaggcggcgccgcgccgacgcgcaaacgcagggcagcggccgaagcccctgtctga

SEQ ID NO: 28 - protein, 260 aa, Ralstonia eutropha
  Ralstonia eutropha JMP134
MPAKPAKPVTIDTAVQESPDLGGRTWASVLEQAVREDIISGRLPAGSKLRLKELAEHYQAGVIPLREALSRLCTTGFVLAIDQKGFRVAELSPEELLDVTRVRQQIECQALRDAIRLADIAWESDVVAAHHRLTRIPMVLRDQRGALNPEWEAAHVAFHDALIWGCHSPWLRRFSAVLRDQTARYRFLSLAVPKAERSRDVAAEHEAIVSAVVARNADRACKLLSDHFQHTTDLVLQYLARQKGGAAPTRKRRAAAEAPV

SEQ ID NO: 29 - DNA, 738 bp, Mesorhizobium sp.
  Mesorhizobium sp. BNC1
  CDS (1)..(738): transl_table=11
atgcacactgtttcgctaaggaccgatcaactatcggaacaggcctatcgcctgatccggaaagctatcttgcggggcgacattgagcctggctcacgcttgaaaatagatatgcttcagcgccagttttcgttctccagcagcccattgcgtgaagctctgaaccggctcgtctccgaagatcttgttgagattgataatcgccgcggctttcgggcggcggccgtttcgctgcgagatatgaaagacctgacggccttccgcctgaacatagagccgatttcgttacgcgagtcgatcgagcatggcgacgacgaatgggaggcgcaggtgcttgccgcctatcatcgccttgaccttctggaggcgcgagaggatgagcaggcgccctacagcgacgaatgggctgagcggcatagagccttccacgcagcacttatcgccgcctgtccttcctcccggcagatttcggtctgcctgaaccttttcgatcatgtagagcgctaccggcggctttcgatctgttggcgaaaatccaaacgcgaccgttcaaacgaacacagggagatcatggatgccgccttggcgcgtgatcatgaaagagcagtctcgaagctgacggagcatatcgagcggacaacgctgcatgtggcgaggatgctaaaggcgctggaaacagaaaaaactgccacaggacaggagcaggtcgaaggtctcggtcgggcaatgaaggcctga

SEQ ID NO: 30 - protein, 245 aa, Mesorhizobium sp.
  Mesorhizobium sp. BNC1
MHTVSLRTDQLSEQAYRLIRKAILRGDIEPGSRLKIDMLQRQFSFSSSPLREALNRLVSEDLVEIDNRRGFRAAAVSLRDMKDLTAFRLNIEPISLRESIEHGDDEWEAQVLAAYHRLDLLEAREDEQAPYSDEWAERHRAFHAALIAACPSSRQISVCLNLFDHVERYRRLSICWRKSKRDRSNEHREIMDAALARDHERAVSKLTEHIERTTLHVARMLKALETEKTATGQEQVEGLGRAMKA

SEQ ID NO: 31 - DNA, 720 bp, Azoarcus sp.
  Azoarcus sp. BH72
  CDS (1)..(720): transl_table=11
atgctcaacgacgtcgccccagccgaacttcccaccgcggagcccaagaccctggtcgaggccgcctacaaccagctgcgccgcgacatcatcgaaggcgttcatccgccgggcgaaaaactgcgcgtcgagcatctaaaggaccagtacgaggtcggcgccggaaccctgcgcgaggccttgctgctgctggtcaccgatgcgctggtggtggcccagggccagcgcggcttccgcgtggcccccatctccgtggccgacttcgaggacatcacccgcacccgcgtgctgctggaaaccgaggcactgcgccagtcgatcgcgctcggcgacgacgcctgggaggccgatctggtcgccgccttccaccgtctgtcgcgcgccgaacagaagctggctgaccacgacgccaacaccaccgaggaatgggagaagcgcaaccgcgccttccacgaggcgctgatcgccgcctgcccctcgcgctggatccgccattttcagcacatcctctatcagcagtccgagcgctaccgccgcatcagcctgttccgccagcccatcgcgcgcgacatccacgccgaacaccaggccatcttcgacgccacgctcgcgcgcgacgccacccgcgccacctccatcctcaccgagcacatcctgcgcacgctggatgcggtgaagcggatgccggaggatttcttcagcaagcctgggcagcggtga

SEQ ID NO: 32 - protein, 239 aa, Azoarcus sp.
  Azoarcus sp. BH72
MLNDVAPAELPTAEPKTLVEAAYNQLRRDIIEGVHPPGEKLRVEHLKDQYEVGAGTLREALLLLVTDALVVAQGQRGFRVAPISVADFEDITRTRVLLETEALRQSIALGDDAWEADLVAAFHRLSRAEQKLADHDANTTEEWEKRNRAFHEALIAACPSRWIRHFQHILYQQSERYRRISLFRQPIARDIHAEHQAIFDATLARDATRATSILTEHILRTLDAVKRMPEDFFSKPGQR

SEQ ID NO: 33 - DNA, 702 bp, Neptuniibacter caesariensis
  CDS (1)..(702): transl_table=11
atggctctttcaccgcaatcaaatccgcaaaacagtgataattttgctacacaggttctcggccagttaaagcaagatattctgactgggtactttaatccgggtgaaaagctgaagatgacccgcctgaaagaacgctatcaggtaggggtcagccctttgcgggaagcgctgtcgcaacttctggtcgaacagctcgtagttgttgagaaccagcgtggcttcaaagtacatccaatctcggctgaagagatggaagatatttatcatacccgtgcagagatagaggccctgtgtgtgagtcaggccattgaccgcggtgatgatgcctgggaggccggtattctggccgctgcccatcagcttaaaaaatcagcagaactgcttgaagaagagaacccggaaaagatccagcgctgggaggcccttcatcaggcctttcacagagcgattgccgagggctgtggctcccctagcctgctccatgtccgcctgtccctttatgagaaagcttcgcgctaccgcaaccactggcttaaagagaatatgctggaccgctctatctttgatgccaaccagaaagagcatgaagcattaaccgaagcactgctcaacagggataaagaaaaggcggtagagattatccgccagcatattctcagcccttaccgactgctgaaagattcgattagcttcgattga

SEQ ID NO: 34 - protein, 233 aa, Neptuniibacter caesariensis
MALSPQSNPQNSDNFATQVLGQLKQDILTGYFNPGEKLKMTRLKERYQVGVSPLREALSQLLVEQLVVVENQRGFKVHPISAEEMEDIYHTRAEIEALCVSQAIDRGDDAWEAGILAAAHQLKKSAELLEEENPEKIQRWEALHQAFHRAIAEGCGSPSLLHVRLSLYEKASRYRNHWLKENMLDRSIFDANQKEHEALTEALLNRDKEKAVEIIRQHILSPYRLLKDSISFD

SEQ ID NO: 35 - DNA, 711 bp, Marinobacter sp.
  Marinobacter sp. ELB17
  CDS (1)..(711): transl_table=11
atgaatcctaaaacacaccaagaagagctggcggatatcagagagaacctcggtgtccgcgcttacaagctgctaaagaatgacattattaggggtcagttccgccccgacgagaagctacgcatgagcatcttgaaagagcgctacgacctcggcatcgggccgctacgtgaagccttgtcgcaattggtagccgagcaattagtcgtggccatcagtcagagaggctatcgcgtttctcctatgtcgcttgcagaattgcatgatatttacgatgcgcgtgcagagctggaagccatgatgcttggcctggcgattgaacggggtgatgacaactgggaagcggagatattggcccgaaactatcagctcgccaaagtgagtgaagcccatacacccgactcactgctggaaatatgggatgcccgccatagccagttccatatcgctctggtttgcggttgccgttctcctcagctaatgaaagtgcgcgatggactctttgataaagttcagcgatatcgtcatgtctggctgaaagaaaccgttttttccagcgaagccctagatcaaaagcgcaaagagcacgctgcgctggtggaagttactcttgcccgccgcaaagacgaggccgagaagatgatgcgcgaacacctgatgacgcctgtgccgattattactgccgtcatgcaacagcaaggaactgcctga

SEQ ID NO: 36 - protein, 236 aa, Marinobacter sp.
  Marinobacter sp. ELB17
MNPKTHQEELADIRENLGVRAYKLLKNDIIRGQFRPDEKLRMSILKERYDLGIGPLREALSQLVAEQLVVAISQRGYRVSPMSLAELHDIYDARAELEAMMLGLAIERGDDNWEAEILARNYQLAKVSEAHTPDSLLEIWDARHSQFHIALVCGCRSPQLMKVRDGLFDKVQRYRHVWLKETVFSSEALDQKRKEHAALVEVTLARRKDEAEKMMREHLMTPVPIITAVMQQQGTA

SEQ ID NO: 37 - DNA, 720 bp, Thauera sp.
  Thauera sp. MZ1T
  CDS (1)..(720): transl_table=11
atgaacgaagccgttccgcaaagaacaccggaggccgtcgagcccaagaccctcgtcgagggggcctaccagcgcctgcgccgggacatcatcgagggcgttcacccgcccggcgagaaacttcgcgtcgaacatctcaaggaccgctacgaggtcggcgccggcaccctgcgcgaggccctcctcctgctcgtcaccgacgccctggtggtcgcccagggacaacgcggcttccgcgtctcgccgatttccatcgaggacttcgaggacatcacccgcacccgcctgctgctcgagaccgaagccctgcgccagtcgctgcagctcggcggcgaggactgggaggcctccgtggtcgcggctttccaccgcctctctcgcgccgagcaaaagctcggcgaccacgactcgctggccgccgaggagtgggagcggcgcaaccgcgccttccacgaggcactgatcgccgcgtcgccctcgcgctggatccgtcatttccagcacatcctctaccagcagtccgagcgctaccggcgcctgagcctgttcagccatccgatcccgcgcgacatccacgccgagcaccaggccttgttcaacgccagcctggcacgcgacaccacgcgcgcgacctccatcctcaccgagcacgtgctgcgcacgctcgacgcggtgaagctgcttccggcggagttcttcgccggcaagcacaagtcctga

SEQ ID NO: 38 - protein, 239 aa, Thauera sp.
  Thauera sp. MZ1T
MNEAVPQRTPEAVEPKTLVEGAYQRLRRDIIEGVHPPGEKLRVEHLKDRYEVGAGTLREALLLLVTDALVVAQGQRGFRVSPISIEDFEDITRTRLLLETEALRQSLQLGGEDWEASVVAAFHRLSRAEQKLGDHDSLAAEEWERRNRAFHEALIAASPSRWIRHFQHILYQQSERYRRLSLFSHPIPRDIHAEHQALFNASLARDTTRATSILTEHVLRTLDAVKLLPAEFFAGKHKS

SEQ ID NO: 39 - DNA, 681 bp, Escherichia coli
  Escherichia coli O6
  CDS (1)..(681): transl_table=11
atgctcaggagtcacaccatgaccattacctctctggatggctatcgctggctgaagaacgatattattcgcggcaattttcagccggatgaaaaattacggatgagtttgctgacatcgcgttatgcacttggcgtcggaccgttgcgggaagcgctttcgcaactggtggcagaacgactggtcacggtggtgaatcaaaaagggtatcgggtggcgtctatgtcagagcaggagctgctcgatattttcgacgcccgcgccaatatggaagcgatgctggtgagtctggcgattgcccgcggtggcgatgaatgggaggcagacgttctcgcaaaagcgcatctgctcagtaagcttgaggcctgtgacgccagtgagaaaatgcttgatgagtgggatctgcgtcatcaggcgtttcatactgcaattgtggcgggctgtggttcttactatttgctgcaaatgcgtgaacggttgtttgatctggcagcgcgttatcgatttatctggctgcggcgaacagtgctttcggtggaaatgctggaagataaacacgatcagcaccagaccctgactgcggcggtactggcgcgagataccgcgcgcgccagtgagttaatgcgccagcatttactgacgccaattcccattatccagcaggcgatggctggcaattaa

SEQ ID NO: 40 - protein, 226 aa, Escherichia coli
  Escherichia coli O6
MLRSHTMTITSLDGYRWLKNDIIRGNFQPDEKLRMSLLTSRYALGVGPLREALSQLVAERLVTVVNQKGYRVASMSEQELLDIFDARANMEAMLVSLAIARGGDEWEADVLAKAHLLSKLEACDASEKMLDEWDLRHQAFHTAIVAGCGSYYLLQMRERLFDLAARYRFIWLRRTVLSVEMLEDKHDQHQTLTAAVLARDTARASELMRQHLLTPIPIIQQAMAGN

SEQ ID NO: 41 - DNA, 663 bp, Escherichia coli
  CDS (1)..(663): transl_table=11
atgaccattacgtctctggatggctatcgctggctgaagaacgatattattcgcggtaattttcaaccggatgaaaaattacgaatgagtttgctgacatcgcgttatgcacttggcgttgggccgttacgggaagctctttcgcaactggtggcggaacggctggtcacggtggtgaatcaaaaagggtatcgggtggcgtctatgtcagagcaggagctgctcgatattttcgacgcccgcgccaatatggaagcgatgttagtgagtctggcgattgcccgcggtggcgatgagtgggaggcagacgttctcgcaaaagcgcatctgctgagtaagcttgaggcctgtgacgccagcgagaaaatgcttgatgagtgggatctgcgtcatcaggcgtttcatacggcaattgtggcgggctgtggttctcactatttgctgcaaatgcgtgaacggttgtttgatctggcggcgcgttatcgatttatctggctgcggcgaacggtgctttcggtggaaatgctggaggataaacacgatcagcaccagaccctgactgcggcggtactggcgcgagataccgcgcgcgccagtgagttaatgcgccagcatttactgacgccaattcccattatccagcaggcgatggctggcaattaa

SEQ ID NO: 42 - protein, 220 aa, Escherichia coli
MTITSLDGYRWLKNDIIRGNFQPDEKLRMSLLTSRYALGVGPLREALSQLVAERLVTVVNQKGYRVASMSEQELLDIFDARANMEAMLVSLAIARGGDEWEADVLAKAHLLSKLEACDASEKMLDEWDLRHQAFHTAIVAGCGSHYLLQMRERLFDLAARYRFIWLRRTVLSVEMLEDKHDQHQTLTAAVLARDTARASELMRQHLLTPIPIIQQAMAGN

SEQ ID NO: 43 - DNA, 22 bp, Artificial sequence
  primer
atgatcaggagtcacaccatga

SEQ ID NO: 44 - DNA, 21 bp, Artificial sequence
  primer
ttaattgccagccatcgcctg

SEQ ID NO: 45 - protein, 199 aa, Artificial sequence
  consensus sequence
  Variant (2)..(3): Xaa in position 2 to 3 is any amino acid
  Variant (5)..(6): Xaa in position 5 to 6 is any amino acid
  Variant (10)..(10): Xaa in position 10 is any amino acid
  Variant (12)..(14): Xaa in position 12 to 14 is any amino acid
  Variant (16)..(16): Xaa in position 16 is any amino acid
  Variant (20)..(23): Xaa in position 20 to 23 is any amino acid
  Variant (25)..(26): Xaa in position 25 to 26 is any amino acid
  Variant (29)..(30): Xaa in position 29 to 30 is any amino acid
  Variant (32)..(33): Xaa in position 32 to 33 is any amino acid
  Variant (41)..(41): Xaa in position 41 is any amino acid
  Variant (44)..(46): Xaa in position 44 to 46 is any amino acid
  Variant (49)..(52): Xaa in position 49 to 52 is any amino acid
  Variant (54)..(54): Xaa in position 54 is any amino acid
  Variant (56)..(56): Xaa in position 56 is any amino acid
  Variant (60)..(61): Xaa in position 60 to 61 is any amino acid
  Variant (63)..(67): Xaa in position 63 to 67 is any amino acid
  Variant (70)..(72): Xaa in position 70 to 72 is any amino acid
  Variant (74)..(76): Xaa in position 74 to 76 is any amino acid
  Variant (78)..(83): Xaa in position 78 to 83 is any amino acid
  Variant (86)..(87): Xaa in position 86 to 87 is any amino acid
  Variant (89)..(89): Xaa in position 89 is any amino acid
  Variant (91)..(91): Xaa in position 91 is any amino acid
  Variant (95)..(97): Xaa in position 95 to 97 is any amino acid
  Variant (99)..(100): Xaa in position 99 to 100 is any amino acid
  Variant (102)..(102): Xaa in position 102 is any amino acid
  Variant (104)..(118): Xaa in position 104 to 118 is any amino acid
  Variant (119)..(120): Xaa in position 119 to 120 is any or no amino acid
  Variant (122)..(123): Xaa in position 122 to 123 is any amino acid
  Variant (126)..(126): Xaa in position 126 is any amino acid
  Variant (130)..(130): Xaa in position 130 is any amino acid
  Variant (132)..(135): Xaa in position 132 to 135 is any amino acid
  Variant (137)..(137): Xaa in position 137 is any amino acid
  Variant (139)..(140): Xaa in position 139 to 140 is any amino acid
  Variant (142)..(147): Xaa in position 142 to 147 is any amino acid
  Variant (149)..(149): Xaa in position 149 is any amino acid
  Variant (151)..(153): Xaa in position 151 to 153 is any amino acid
  Variant (157)..(159): Xaa in position 157 to 159 is any amino acid
  Variant (161)..(172): Xaa in position 161 to 172 is any amino acid
  Variant (173)..(176): Xaa in position 173 to 176 is any or no amino acid
  Variant (178)..(179): Xaa in position 178 to 179 is any amino acid
  Variant (181)..(184): Xaa in position 181 to 184 is any amino acid
  Variant (188)..(191): Xaa in position 188 to 191 is any amino acid
  Variant (193)..(198): Xaa in position 193 to 198 is any amino acid
YXXLXXDIIXGXXXPXEKLXXXXLXXRYXXGXXPLREALSXLVXXXLVXXXXQXGXRVAXXSXXXXXDIXXXRXXXEXXXXXXAIXXGXDXWEAXXXAXXHXLXXXXXXXXXXXXXXXXXWXXRHXAFHXAXXXXCXSXXLXXXXXXLXDXXXRYRXXXLXXXXXXXXXXXXXXXXHXXLXXXXLARXXXXAXXXXXXH

SEQ ID NO: 46 - protein, 57 aa, Escherichia coli
  protein pattern
  Variant (3)..(3): Xaa in position 3 is Ile or Leu
  Variant (4)..(4): Xaa in position 4 is any amino acid
  Variant (6)..(6): Xaa in position 6 is any amino acid
  Variant (7)..(7): Xaa in position 7 is Phe, His or Tyr
  Variant (8)..(8): Xaa in position 8 is any amino acid
  Variant (10)..(10): Xaa in position 10 is Asp or Gly
  Variant (14)..(14): Xaa in position 14 is any amino acid
  Variant (15)..(15): Xaa in position 15 is Met or Val
  Variant (16)..(16): Xaa in position 16 is Glu, Ser or Thr
  Variant (17)..(17): Xaa in position 17 is any amino acid
  Variant (19)..(19): Xaa in position 19 is any amino acid
  Variant (20)..(20): Xaa in position 20 is Ala, Asp, Glu or Ser
  Variant (21)..(21): Xaa in position 21 is Gln or Arg
  Variant (23)..(23): Xaa in position 23 is Ala, Asp, Glu, Gly or Gln
  Variant (24)..(24): Xaa in position 24 is Leu or Val
  Variant (26)..(26): Xaa in position 26 is Ala, Ile or Val
  Variant (27)..(27): Xaa in position 27 is Gly or Ser
  Variant (28)..(28): Xaa in position 28 is Pro or Thr
  Variant (30)..(30): Xaa in position 30 is Gln or Arg
  Variant (34)..(35): Xaa in position 34 to 35 is any amino acid
  Variant (37)..(37): Xaa in position 37 is any or no amino acid
  Variant (39)..(40): Xaa in position 39 to 40 is any amino acid
  Variant (41)..(41): Xaa in position 41 is any or no amino acid
  Variant (44)..(44): Xaa in position 44 is Asn, Thr or Val
  Variant (45)..(45): Xaa in position 45 is Ala or Val
  Variant (46)..(46): Xaa in position 46 is any amino acid
  Variant (47)..(47): Xaa in position 47 is Gly, Asn or Ser
  Variant (49)..(49): Xaa in position 49 is Lys or Arg
  Variant (51)..(51): Xaa in position 51 is Phe or Tyr
  Variant (52)..(52): Xaa in position 52 is Lys or Arg
  Variant (54)..(54): Xaa in position 54 is any amino acid
  Variant (55)..(55): Xaa in position 55 is Pro or Ser
  Variant (56)..(56): Xaa in position 56 is Ile or Met
DIXXGXXXPXEKLXXXXLXXXYXXGXXXLXEALXXLXVXXXLVXXXXQXGXXVXXXS

SEQ ID NO: 47 - protein, 37 aa, Escherichia coli
  protein pattern
  Variant (2)..(2): Xaa in position 2 is any amino acid
  Variant (3)..(3): Xaa in position 3 is any or no amino acid
  Variant (5)..(8): Xaa in position 5 to 8 is any or no amino acid
  Variant (11)..(11): Xaa in position 11 is any amino acid
  Variant (13)..(13): Xaa in position 13 is Ile or Leu
  Variant (14)..(14): Xaa in position 14 is Ala, Ile or Val
  Variant (15)..(15): Xaa in position 15 is Ala, Glu or Ser
  Variant (16)..(16): Xaa in position 16 is Ala or Gly
  Variant (17)..(17): Xaa in position 17 is Cys or Ser
  Variant (18)..(18): Xaa in position 18 is Gly or Pro
  Variant (20)..(28): Xaa in position 20 to 28 is any amino acid
  Variant (30)..(30): Xaa in position 30 is Phe or Tyr
  Variant (31)..(31): Xaa in position 31 is Asp, Glu or Gln
  Variant (32)..(32): Xaa in position 32 is any amino acid
  Variant (33)..(33): Xaa in position 33 is Ala, Ser or Val
  Variant (34)..(34): Xaa in position 34 is Ala, Glu or Ser
RXXAXXXXFHXAXXXXXXSXXXXXXXXXLXXXXXRYR

SEQ ID NO: 48 - protein, 41 aa, Escherichia coli
  protein pattern
  Variant (2)..(4): Xaa in position 2 to 4 is any or no amino acid
  Variant (6)..(6): Xaa in position 6 is any amino acid
  Variant (7)..(7): Xaa in position 7 is Asp, His or Arg
  Variant (8)..(8): Xaa in position 8 is any amino acid
  Variant (10)..(10): Xaa in position 10 is Ala, Thr or Val
  Variant (11)..(11): Xaa in position 11 is any amino acid
  Variant (12)..(12): Xaa in position 12 is Ile, Leu or Met
  Variant (14)..(16): Xaa in position 14 to 16 is any amino acid
  Variant (17)..(17): Xaa in position 17 is Ile, Leu or Val
  Variant (18)..(19): Xaa in position 18 to 19 is any amino acid
  Variant (20)..(20): Xaa in position 20 is Ala or Ser
  Variant (22)..(22): Xaa in position 22 is Ala, Asp or Glu
  Variant (23)..(23): Xaa in position 23 is any amino acid
  Variant (25)..(25): Xaa in position 25 is Asp or Gly
  Variant (27)..(27): Xaa in position 27 is Ala, Glu or Asn
  Variant (31)..(31): Xaa in position 31 is Asp, Glu, Gly or Ser
  Variant (32)..(32): Xaa in position 32 is Ile, Leu or Val
  Variant (33)..(33): Xaa in position 33 is Leu or Val
  Variant (35)..(36): Xaa in position 35 to 36 is any amino acid
  Variant (37)..(37): Xaa in position 37 is His or Tyr
  Variant (38)..(38): Xaa in position 38 is any amino acid
  Variant (39)..(39): Xaa in position 39 is Leu or Met
  Variant (40)..(40): Xaa in position 40 is any amino acid
  Variant (41)..(41): Xaa in position 41 is Lys or Arg
DXXXIXXXRXXXEXXXXXXXIXXGXDXWEAXXXAXXXXXXX

SEQ ID NO: 49 - protein, 37 aa, Escherichia coli
  protein pattern
  Variant (2)..(6): Xaa in position 2 to 6 is any or no amino acid
  Variant (8)..(8): Xaa in position 8 is any amino acid
  Variant (9)..(9): Xaa in position 9 is Ala or Thr
  Variant (10)..(10): Xaa in position 10 is Ile or Leu
  Variant (11)..(11): Xaa in position 11 is any amino acid
  Variant (12)..(12): Xaa in position 12 is Ala, Asp, Glu or Asn
  Variant (13)..(13): Xaa in position 13 is Ala or Val
  Variant (14)..(14): Xaa in position 14 is any amino acid
  Variant (16)..(16): Xaa in position 16 is Ala, Asn or Pro
  Variant (18)..(18): Xaa in position 18 is Asp, Glu or Arg
  Variant (19)..(21): Xaa in position 19 to 21 is any amino acid
  Variant (23)..(24): Xaa in position 23 to 24 is any amino acid
  Variant (25)..(26): Xaa in position 25 to 26 is Ile, Leu or Met
  Variant (27)..(27): Xaa in position 27 is any amino acid
  Variant (28)..(28): Xaa in position 28 is Glu, Gln or Ser
  Variant (30)..(30): Xaa in position 30 is Ile, Leu or Val
  Variant (31)..(31): Xaa in position 31 is Leu or Met
  Variant (32)..(32): Xaa in position 32 is any amino acid
  Variant (33)..(33): Xaa in position 33 is Pro or Thr
  Variant (34)..(35): Xaa in position 34 to 35 is any amino acid
  Variant (36)..(36): Xaa in position 36 is Ala, Ile or Leu
  Variant (37)..(37): Xaa in position 37 is Ile, Leu or Val
EXXXXXHXXXXXXXLXRXXXXAXXXXXXHXXXXXXXX

SEQ ID NO: 50 - DNA, 579 bp, Saccharomyces cerevisiae
  CDS (1)..(579)
atgtctgaaaaggccgttagaaggaaacttgttattattggtgatggtgcttgtggcaagacctctttactatatgtatttacattaggaaaattccctgaacaatatcatccgacagtgttcgagaattatgtcactgattgcagagttgacggaataaaagtgtccttaacgctctgggatacagcgggacaagaggaatatgaacgtttacgtccattctcatattcaaaagcagatataatattaattgggtttgctgtagacaattttgaatcactaattaacgcaaggacgaaatgggcggatgaggcattacgatattgtcctgacgcaccaatcgttcttgtaggcttgaaaaaagatttgaggcaagaagcccattttaaagagaatgctaccgatgaaatggttcccattgaagatgcaaaacaagttgcaagggccattggggccaagaaatacatggaatgtagtgcactgactggtgagggtgtggatgatgtctttgaagtagctacaagaaccagtttgcttatgaagaaggaaccaggggctaactgttgcataattttataa

SEQ ID NO: 51 - protein, 192 aa, Saccharomyces cerevisiae
MSEKAVRRKLVIIGDGACGKTSLLYVFTLGKFPEQYHPTVFENYVTDCRVDGIKVSLTLWDTAGQEEYERLRPFSYSKADIILIGFAVDNFESLINARTKWADEALRYCPDAPIVLVGLKKDLRQEAHFKENATDEMVPIEDAKQVARAIGAKKYMECSALTGEGVDDVFEVATRTSLLMKKEPGANCCIIL

SEQ ID NO: 52 - DNA, 564 bp, Eremothecium gossypii
  CDS (1)..(564)
atgacggtcaacgttgtgagacggaagttggtaatcataggggatggggcatgcggcaagacgtcgttactacatgtgttcacgctggggaagttccctgaggaatatctgcccacggttttcgagaactacgttacggattgccgtgtagacggcataaaagtgcagttggcgctatgggatactgctggtcaggaagaatacgagcgtctgcgccccatgtcctactcgaaggcggacatcatattaatcgggtttgccatagacgacccggggtcgttgtccaatgcgcgggagaagtggacggtcgaggcgctgcgctactgtcccaacgccccgatcatcctcgtggggctcaaaaaggaccttcgccgccccgggacgcagtgcgcgatggtagcgccttcgcaggcacaagaggtggtgcgcgccatcggcgcaaagaaatacatggagtgcagcgcacttacgggggagggcgtggacgatgtgttcgagctggccacgagaacaagtcttctggtgaacaaggagccgggtcaaggctgttgcattatctcatga

SEQ ID NO: 53 - protein, 187 aa, Eremothecium gossypii
MTVNVVRRKLVIIGDGACGKTSLLHVFTLGKFPEEYLPTVFENYVTDCRVDGIKVQLALWDTAGQEEYERLRPMSYSKADIILIGFAIDDPGSLSNAREKWTVEALRYCPNAPIILVGLKKDLRRPGTQCAMVAPSQAQEVVRAIGAKKYMECSALTGEGVDDVFELATRTSLLVNKEPGQGCCIIS

SEQ ID NO: 54 - DNA, 594 bp, Glycine max
  CDS (1)..(594)
atgagtgcatcgaggttcattaagtgcgtcaccgtcggcgacggcgctgtcggcaaaacctgcttgttgatttcctacaccagcaacacttttcccacggactacgtgcccacggtttttgacaatttcagtgctaatgttgtggtggatggaagcaccgtaaacctggggttgtgggatactgctggtcaggaggattataataggcttagacccttgagttatcgaggagctgatgtatttatacttgccttttctctcataagcaaggctagctatgaaaatattgcaaagaagtggatccctgaactaaggcattatgcccctggtgttccaataattctcgttggaacaaagttagatcttcgagaagataagcaattttttatagaccaccctggtgcagtaccaataactacaacacagggagaagaattaagaaaactgattggtgctcctgcttacatcgagtgtagttcaaaaacacagcagaatgttaaagctgtctttgacgctgccatcaaagtggttcttcaaccaccaaagcaaaagaaaaagaagagaaaagcacagaaagcttgctcaatattgtga

SEQ ID NO: 55 - protein, 197 aa, Glycine max
MSASRFIKCVTVGDGAVGKTCLLISYTSNTFPTDYVPTVFDNFSANVVVDGSTVNLGLWDTAGQEDYNRLRPLSYRGADVFILAFSLISKASYENIAKKWIPELRHYAPGVPIILVGTKLDLREDKQFFIDHPGAVPITTTQGEELRKLIGAPAYIECSSKTQQNVKAVFDAAIKVVLQPPKQKKKKRKAQKACSIL

SEQ ID NO: 56 - DNA, 636 bp, Glycine max
  CDS (1)..(636)
atgaatgcttcaaagttcattaaatgtgttactgttggagatggagctgttgggaaaacctgcatgctcatttgctacaccagcaacaagttccccactgattacataccaacagtatttgacaatttcagtgccaatgttgctgtggatggaagcattgtcaatttggggctatgggacacagcaggccaggaagactatagcaggttgaggccactgagctatagaggagcagacatttttgtcttagcattctcactgattagcagagctagctatgaaaatgttctcaagaagtggatgccggaattgcgtagatttgcacctaatgttccaattgttcttgttggtacgaagctagatcttcgtgaagaccggggttatgtagctgatcacatgggatctaatgtcataacatctgctgagggggaagaactgaggaaacaaattggtgcagctgcttacattgagtgcagttcaaagactcaacagaatgtcaaagcagtgtttgacactgcaattaaggttgttctccaacctcaacctccaaggaggaaagaaatggcaaggaagaaaaggcatagaaggtctggttgctcatttgtaagtattatgtgcggaggctgtgctgcttaa

SEQ ID NO: 57 - protein, 211 aa, Glycine max
MNASKFIKCVTVGDGAVGKTCMLICYTSNKFPTDYIPTVFDNFSANVAVDGSIVNLGLWDTAGQEDYSRLRPLSYRGADIFVLAFSLISRASYENVLKKWMPELRRFAPNVPIVLVGTKLDLREDRGYVADHMGSNVITSAEGEELRKQIGAAAYIECSSKTQQNVKAVFDTAIKVVLQPQPPRRKEMARKKRHRRSGCSFVSIMCGGCAA

SEQ ID NO: 58 - DNA, 768 bp, Glycine max
  CDS (36)..(665)
ggacaacctttgtgagaacttgttgttgttgttcaatggctgcaacagcttcaaggtttatcaagtgtgtgacagttggggatggagctgtaggcaaaacttgcatgctcatttgctatactagcaacaaattccccacggactatattccaacggtgtttgataatttcagtgcaaatgtagttgtggaaggcacaactgtcaatttaggcctctgggacactgctggacaagaggattacaacagactgaggcctttgagctacaggggggcagatgtctttgtcttggctttctctttagtcagtcatgcaagctatgaaaatgtgttgaagaagtgggttcctgagctgcagcattttgctcccggcattccagtggtgctagttggcaccaaattggatctccgagaagacaagcactatttggctgatcatcctggtctggtgcctgtgacttctgagcaaggtgaggaattgcgtaaactggtgggagctacatattatatagagtgcagctcaaaaactcagcagaatgtgaagtcagtttttgatgctgctataaaggtggtcattaagcctccacaaaaacaagagaagaaaaaaccacgtcgagggtgtctactaaatgtcatctgtggaaggaatatagttcgttttaaatgaaacatttcgtccaaaggcttttcttgggagggagaagcactgtcatcatcattctgtagaattttttaaattgacctgggtcctttggctttttaatttcatg

SEQ ID NO: 59 - protein, 209 aa, Glycine max
MAATASRFIKCVTVGDGAVGKTCMLICYTSNKFPTDYIPTVFDNFSANVVVEGTTVNLGLWDTAGQEDYNRLRPLSYRGADVFVLAFSLVSHASYENVLKKWVPELQHFAPGIPVVLVGTKLDLREDKHYLADHPGLVPVTSEQGEELRKLVGATYYIECSSKTQQNVKSVFDAAIKVVIKPPQKQEKKKPRRGCLLNVICGRNIVRFK

SEQ ID NO: 60 - DNA, 639 bp, Glycine max
  CDS (1)..(639)
atggctgctgcaactgccccaagattcatcaagtgtgtgaccgttggcgatggagctgtagggaagacctgcatgctcatttgctataccagcaacaaattccccacggactatatccccactgtgtttgataatttcagtgcaaatgtggttgttgaaggcataactgtcaatttaggcctttgggatacagctgggcaagaggattacaacaggctgaggcccttgagctacaggggggcagatgtctttgtcttggctttttctttagttagtcgcgcaagctatgagaatgtgctgaagaagtggatccctgaactccagcattttgcccctggcatcccattggtattagttggcacaaaattggatctgcgcgaagacaggcactatatggctgatcatcctggcttggtgcccgtgactactgagcaaggtgaggaactccgtaaacatattggagctacctactatattgagtgcagctcaaaaactcagcagaatgtgaaggcagtttttgatgctgcgatcagaatggtcatcaagcctccacaaaagcaaaacgagaaaaggaagaaaaaaccacgtggctgtttcctaaatgtcctctgtggaaggaacattgttcgtcttaagtga

SEQ ID NO: 61 - protein, 212 aa, Glycine max
MAAATAPRFIKCVTVGDGAVGKTCMLICYTSNKFPTDYIPTVFDNFSANVVVEGITVNLGLWDTAGQEDYNRLRPLSYRGADVFVLAFSLVSRASYENVLKKWIPELQHFAPGIPLVLVGTKLDLREDRHYMADHPGLVPVTTEQGEELRKHIGATYYIECSSKTQQNVKAVFDAAIRMVIKPPQKQNEKRKKKPRGCFLNVLCGRNIVRLK

SEQ ID NO: 62 - DNA, 594 bp, Glycine max
  CDS (1)..(594)
atgagtgcgtccaggttcatcaagtgtgtcactgtgggtgacggtgccgttggcaagacttgcatgctcatctcctacaccagcaacacttttcctacggactacgtgccaactgtctttgacaatttcagtgcaaatgtcgttgtggatggaagcactgtgaatcttgggttgtgggatactgctggccaagaagattacaatagattgagacccttaagctatcgtggagcagatgtattcctgcttgctttctctctcataagcagggccagctatgaaaatgttgccaagaaatggattcctgagttgaggcattatgctcctggtgttccaattattcttgttggaacaaaacttgatcttcgggatgataagcagttctttcaagaccatcctggtgcagtgcctatcaccacagcacagggtgaggaactgagaaagcttatcggtgctccaatttacattgaatgtagttcaaaaacacaacagaatgtgaaggctgtttttgatgcagccatcaaggtagttctccagcccccaaagcagaagaaaaagaagagaaagggacaaaaggcctgttccattttgtga

SEQ ID NO: 63 - protein, 197 aa, Glycine max
MSASRFIKCVTVGDGAVGKTCMLISYTSNTFPTDYVPTVFDNFSANVVVDGSTVNLGLWDTAGQEDYNRLRPLSYRGADVFLLAFSLISRASYENVAKKWIPELRHYAPGVPIILVGTKLDLRDDKQFFQDHPGAVPITTAQGEELRKLIGAPIYIECSSKTQQNVKAVFDAAIKVVLQPPKQKKKKRKGQKACSIL

SEQ ID NO: 64 - DNA, 594 bp, Glycine max
  CDS (1)..(594)
atgagcgcttctaggttcatcaagtgcgtcactgttggggatggtgctgtgggcaaaacctgtttgcttatttcctacaccagcaacacttttcccaccgattatgtgccgactgtttttgacaatttcagcgcaaatgtggttgtcaatgggagcattgtgaatctgggtttgtgggatactgctggacaagaggattataacagattaagacctttgagttaccgtggtgccgatgttttcatactggctttctctctcataagcaaggccagttatgaaaatgtctctaaaaagtggattccggagttgaagcattatgctcctggtgtccccattattctggttggcacaaagcttgaccttcgggatgataagcagttctgcattgaccatcctggtgccgtacctattaccacagctcagggagaagagcttaggaagctgattaatgcgccagcttacattgaatgcagttcaaaaacacaggagaacgtgaaggcagtctttgatgcagccataagagttgtccttcaaccacctaagcagaagaaaaagaagggtaaagcacaaaaggcctgttcgatattgtga

SEQ ID NO: 65 - protein, 197 aa, Glycine max
MSASRFIKCVTVGDGAVGKTCLLISYTSNTFPTDYVPTVFDNFSANVVVNGSIVNLGLWDTAGQEDYNRLRPLSYRGADVFILAFSLISKASYENVSKKWIPELKHYAPGVPIILVGTKLDLRDDKQFCIDHPGAVPITTAQGEELRKLINAPAYIECSSKTQENVKAVFDAAIRVVLQPPKQKKKKGKAQKACSIL

SEQ ID NO: 66 - DNA, 594 bp, Glycine max
  CDS (1)..(594)
atgagcgcttctaggttcatcaagtgtgtcactgtcggggatggagccgtgggcaaaacttgtttgctaatctcctacaccagcaacaccttccccactgattatgtgccaactgttttcgacaatttcagcgcaaatgtggttgtgaatggagccactgttaatctaggattatgggacactgccggtcaagaggattataatagattacgacctttgagttatcgtggtgccgatgttttcatattagctttctctctgattagcaaggccagttatgaaaatgtttccaagaagtggattccagagttgaaacattatgcacctgatgttcccattattttggttggcacaaagcttgaccttcgagatgataagcagttcttcatagaccatcctggtgctgtacccattaccaccgttcagggagaagaacttatgaagctgattaatgcacctgcttacattgaatgcagttcgaaatcacaacagaacgtgaaggcagtatttgatgcagccataagagttgtccttcaaccaccaaagcaaaagaaaaagaagagtaaagcacaaaaggcatgttcaatattgtga

SEQ ID NO: 67 - protein, 197 aa, Glycine max
MSASRFIKCVTVGDGAVGKTCLLISYTSNTFPTDYVPTVFDNFSANVVVNGATVNLGLWDTAGQEDYNRLRPLSYRGADVFILAFSLISKASYENVSKKWIPELKHYAPDVPIILVGTKLDLRDDKQFFIDHPGAVPITTVQGEELMKLINAPAYIECSSKSQQNVKAVFDAAIRVVLQPPKQKKKKSKAQKACSIL

SEQ ID NO: 68 - DNA, 594 bp, Glycine max
  CDS (1)..(594)
atgagtgcgtccaggttcatcaagtgtgtcactgtgggtgacggtgccgttggcaagacttgcatgctcatctcctacaccagcaacacttttcctacggactacgtgccaactgtctttgacaatttcagtgcaaatgtagttgtggatggaagcactgtgaatcttgggttgtgggatactgctggccaagaagattacaatagattaagacccttaagctatcgtggagcagatgtattcctgcttgctttctctctcataagcagggctagctatgaaaatgttgccaagaaatggattcctgagttgaggcattatgctcctggtgttccaattattcttgttggaacaaaacttgatcttcgggatgataagcagttctttcaagaccatcctggtgcagtgcctatcaccacagcacagggtgaggagctgagaaagcttatcggtgctccagtttacattgaatgtagttcaaaaacgcaacagaatgtgaaggctgtttttgatgcggccatcaaggtagttctccagcccccaaaacagaagaaaaagaagagaaaggggcaaaaggcctgttccattttgtga

SEQ ID NO: 69 - protein, 197 aa, Glycine max
MSASRFIKCVTVGDGAVGKTCMLISYTSNTFPTDYVPTVFDNFSANVVVDGSTVNLGLWDTAGQEDYNRLRPLSYRGADVFLLAFSLISRASYENVAKKWIPELRHYAPGVPIILVGTKLDLRDDKQFFQDHPGAVPITTAQGEELRKLIGAPVYIECSSKTQQNVKAVFDAAIKVVLQPPKQKKKKRKGQKACSIL

SEQ ID NO: 70 - DNA, 564 bp, Glycine max
  CDS (1)..(564)
atgagtacagccaggtttatcaagtgtgtaacagttggagatggtgctgtgggaaagacatgcatgcttatatcctataccagcaatacctttcccacggattatgttccaacagtgtttgacaatttcagtgctaatgtaaccgtggatggtagtacggttaatcttggtttatgggacactgcagggcaagaagattacaataggctgaggcctttaagctatagaggagctgatgtgtttttgttgtgctattctctcatcagcaaagccagttatgagaacatctccaaaaagtggatacctgagctgagacattatgctccaaatgtgcctatagtgctggtgggaacaaaactagatttgcgagatgacaagcaatttctgattgatcatccgggatccgcacgaataacaactgctcaggcattcacttatattgagtgcagctccaaaacacagcagaatgtgaagacagtttttgatgctgcaataaaggttgcattgaggccaccaaagccaaagaagaaaccacgcaagaaaaagacctgtcctttcctctga

SEQ ID NO: 71 - protein, 187 aa, Glycine max
MSTARFIKCVTVGDGAVGKTCMLISYTSNTFPTDYVPTVFDNFSANVTVDGSTVNLGLWDTAGQEDYNRLRPLSYRGADVFLLCYSLISKASYENISKKWIPELRHYAPNVPIVLVGTKLDLRDDKQFLIDHPGSARITTAQAFTYIECSSKTQQNVKTVFDAAIKVALRPPKPKKKPRKKKTCPFL

SEQ ID NO: 72 - DNA, 594 bp, Glycine max
  CDS (1)..(594)
atgagcacaacacggtttattaagtgtgtcacagttggtgatggggctgtgggaaagacttgcatgcttatctcttacactagcaacactttccccacggattatgttcctacagttttcgacaatttcagtgcaaatgttgtggttgatggcagcacagttaacctgggattgtgggacactgctggacaggaagattacaacaggcttaggccattgagttacagaggagcagatgtgttcttgctggccttttccctcatcagcaaagccagctatgaaaatatatctaaaaagtggattcctgaattgagacattatgccccaactgtgcctattgtactggttggaactaaacttgatttgagggaagacaggcaatatttgattgatcatcctggaaccacagctatagctactgcccagggagaagaactgaagaaggcaattggtgctgctgtgtacatagagtgcagctcaaagactcagcagaatgtgaaggccgtgtttgatgctgcaatcaaggttgttttgcaaccacctaagtccaagaaaaaaggaaagaagaagaacacgccttgtgttttcctctga

SEQ ID NO: 73 - protein, 197 aa, Glycine max
MSTTRFIKCVTVGDGAVGKTCMLISYTSNTFPTDYVPTVFDNFSANVVVDGSTVNLGLWDTAGQEDYNRLRPLSYRGADVFLLAFSLISKASYENISKKWIPELRHYAPTVPIVLVGTKLDLREDRQYLIDHPGTTAIATAQGEELKKAIGAAVYIECSSKTQQNVKAVFDAAIKVVLQPPKSKKKGKKKNTPCVFL

SEQ ID NO: 74 - DNA, 630 bp, Glycine max
  CDS (1)..(630)
atgaatgcttcaaagttcattaaatgtgttactgttggagatggagctgttgggaaaacctgcatgctcatttgctacaccagcaacaagttccccactgattacataccaacagtatttgataattttagtgccaatgttgctgtggatggaagcattgtcaatttggggctatgggacacagcaggccaggaagactacagcaggttgaggccattgagttatagaggagcagacatttttgtcttagcattctcactgattagcagagctagctatgaaaatgttctcaagaagtggatgccggaattgcgtagatttgcacctaatgttccaattgttcttgttggtacaaagttagatcttcgtgaagaccggggttatgtagctgatcacatgggatctagcgtcataacatctgctgagggggaagaactgaggaaacaaattggtgcagtagcttacatagagtgcagttcaaagactcaacagaatgtcaaagcagtgtttgacactgcaattaaggttgttctccaacctccaaggaggaaagaaatggctaggaagaaaaggcataggaggtctggttgctcatttgtaagtatcatgtgtggaggctgtgctgcttaa

SEQ ID NO: 75 - protein, 209 aa, Glycine max
MNASKFIKCVTVGDGAVGKTCMLICYTSNKFPTDYIPTVFDNFSANVAVDGSIVNLGLWDTAGQEDYSRLRPLSYRGADIFVLAFSLISRASYENVLKKWMPELRRFAPNVPIVLVGTKLDLREDRGYVADHMGSSVITSAEGEELRKQIGAVAYIECSSKTQQNVKAVFDTAIKVVLQPPRRKEMARKKRHRRSGCSFVSIMCGGCAA

SEQ ID NO: 76 - DNA, 591 bp, Glycine max
  CDS (1)..(591)
atgagtacagcaagattcatcaagtgtgttactgtcggagatggagccgtgggaaagacctgtatgctcatctcttacaccagcaacacattccccacggattatgttcctacagtttttgacaacttcagtgcaaatgtggtggttgatggaagcacagttaatctcggattatgggacactgctggacaggaggattacaacaggcttaggcccttgagctacagaggagcagatgtgtttttgcttgcattttccctcctcagcagagccagctatgaaaatatctctaagaagtggattcctgaactgagacattatgcccccactgtgccaattgtacttgtgggaaccaaacttgatttgagggaagataggcagtatttgattgatcatcctggagccacacctataactactgctcaggcagaagagctgaagaaggcaattggtgctgctgtgtacatagaatgcagctcaaagactcagcagaatgtgaaggctgtgtttgatgctgcaatcaaggttgttttgcagccaccaaagccaaagaaaaaaagaaagaagaacaggacatgcgttttcctttaa

SEQ ID NO: 77 - protein, 196 aa, Glycine max
MSTARFIKCVTVGDGAVGKTCMLISYTSNTFPTDYVPTVFDNFSANVVVDGSTVNLGLWDTAGQEDYNRLRPLSYRGADVFLLAFSLLSRASYENISKKWIPELRHYAPTVPIVLVGTKLDLREDRQYLIDHPGATPITTAQAEELKKAIGAAVYIECSSKTQQNVKAVFDAAIKVVLQPPKPKKKRKKNRTCVFL

SEQ ID NO: 78 - DNA, 639 bp, Glycine max
  CDS (1)..(639)
atggcttccgcaactgccccaagattcatcaagtgcgtgaccgttggtgatggagctgtagggaagacctgcatgctcatttgctataccagcaacaaattccccacggactatatccccactgtgtttgataatttcagtgcaaatgtggttgttgaaggcataactgtcaacttaggcctttgggatacagctgggcaagaggattacaacaggctgaggcccttgagctacaggggggcagatgtctttgtcttggctttttctttagttagtcgcgcgagctatgagaatgtgctgaagaagtggatccctgaactccagcattttgcccctggcatcccgttggtgttagttggcaccaaattggatctacgagaagacaagcactacatggctgatcatcccagcttggtgccagtgactactgatcaaggtgaggaactccgtaaacacattggagctacctactatattgagtgcagctcaaaaactcagcagaatgtgaaggcagtttttgatgctgctattagaatggtcatcaagcctccacaaaagcaaaacgagaaaagaaagaaaaaaccacgtggctgtttcctaaacgtcctctgtcgaaggaacattgttcgccttaaatga

SEQ ID NO: 79 - protein, 212 aa, Glycine max
MASATAPRFIKCVTVGDGAVGKTCMLICYTSNKFPTDYIPTVFDNFSANVVVEGITVNLGLWDTAGQEDYNRLRPLSYRGADVFVLAFSLVSRASYENVLKKWIPELQHFAPGIPLVLVGTKLDLREDKHYMADHPSLVPVTTDQGEELRKHIGATYYIECSSKTQQNVKAVFDAAIRMVIKPPQKQNEKRKKKPRGCFLNVLCRRNIVRLK

SEQ ID NO: 80 - DNA, 745 bp, Glycine max
  CDS (19)..(612)
tagatctctgatctgaagatgagtgcgtcgaggttcattaagtgcgtcaccgtcggcgacggcgctgtcggcaaaacctgcttgttgatttcctacaccagcaacacttttcccacggactacgtgcccacggtttttgacaatttcagtgctaatgttgtggtggatggaagcaccgtaaacttggcattgtgggatactgctggtcaggaagattataataggcttagacccttgagctatcgaggagctgatgtttttatacttgccttttctctcataagcaaggctagctatgaaaatattgcaaagaagtggatccctgaactaaggcattatgcccctggtgttccaataattctcgttggaacaaagttagatcttcgggaagataagcaattttttatggaccaccctggtgcagtaccaattactacagcacagggagaagaattaagaaaactgattggtgctcctgcctacatcgagtgtagttcaaaaacacagcagaatgtgaaagccgtctttgacgctgccatcaaagtggttcttcaaccaccaaagcaaaagaaaaagaagagaaaggcacaaaaagcttgctcaatattgtgattaagaatcagaaggcttgctcaatagtatgatttaagaaccagagattaataggaggtattgactgtctggccaacctttaatgctgcctccccattggtttttcttgttttggtcgctatcctttgtagcg

SEQ ID NO: 81 - protein, 197 aa, Glycine max
MSASRFIKCVTVGDGAVGKTCLLISYTSNTFPTDYVPTVFDNFSANVVVDGSTVNLALWDTAGQEDYNRLRPLSYRGADVFILAFSLISKASYENIAKKWIPELRHYAPGVPIILVGTKLDLREDKQFFMDHPGAVPITTAQGEELRKLIGAPAYIECSSKTQQNVKAVFDAAIKVVLQPPKQKKKKRKAQKACSIL

SEQ ID NO: 82 - DNA, 591 bp, Glycine max
  CDS (1)..(591)
atgagtgcgtcgaggttcattaagtgcgtcaccgtcggcgacggtgctgtcggcaaaacctgcttgttgatttcctacaccagcaacacttttcccacggactatgtgcccaccgtttttgacaatttcagtgctaatgtggtggtggatggaagcaccgtaaacctaggattgtgggatacagctggtcaggaggattacaatagattaagacccttgagctatcgaggagctgatgtcttcatacttgccttttctctcataagcaaggctagctatgaaaatattgcaaagaagtggatccctgaactaaggcattatgcccctggtgttccaataattctcgttggaacaaagttagatcttcgggatgataagcaattttttatggaccatcctggtgcagtgccaattactacagcacagggagaagaattgagaaagctgattggtgctccggcctacattgagtgtagttccaaaacgcaacagaacgtgaaagctgtctttgacgcggcaatcaaagtggttatccaaccaccaaagctaaagaaaaagagaaaaacacagaaagcttgctccatattatga

SEQ ID NO: 83 - protein, 196 aa, Glycine max
MSASRFIKCVTVGDGAVGKTCLLISYTSNTFPTDYVPTVFDNFSANVVVDGSTVNLGLWDTAGQEDYNRLRPLSYRGADVFILAFSLISKASYENIAKKWIPELRHYAPGVPIILVGTKLDLRDDKQFFMDHPGAVPITTAQGEELRKLIGAPAYIECSSKTQQNVKAVFDAAIKVVIQPPKLKKKRKTQKACSIL

SEQ ID NO: 84 - DNA, 582 bp, Ciona intestinalis
  CDS (1)..(582)
atggcttcaattcgtaagaagctggtaatagttggtgatggtgcttgtggtaaaacttgcttactcatcgtgtttagcaaagatcaattcccagaagtttacgtcccaactgtttttgaaaactatgtggctgatattgaagtagactctaaacaggttgagcttgctttgtgggatacagctggtcaagaagattacgacaggcttcgtccactttcctaccccgatactgatgttattcttatgtgtttctcaatcgacagcccagattcacttgagaacattcccgaaaaatggacccctgaggtaaggcatttttgcccaagtgttccaatcattttggttggaaacaaaaaagatcttcgtaacgacagttcaacaataaaggaacttgctaaaatgaaacaatctgccgttagtaacgaagatggaatggcgatggcagagaagattggcgcttacggatatatggaatgttcagcgcgcaccaaagaaggtgttcgggaagtgtttgagcttgcaactaaagcagctttacaaaccaagaaaagaaagaaaaagagtggatgtgaagtcttgtaa

SEQ ID NO: 85 - protein, 193 aa, Ciona intestinalis
MASIRKKLVIVGDGACGKTCLLIVFSKDQFPEVYVPTVFENYVADIEVDSKQVELALWDTAGQEDYDRLRPLSYPDTDVILMCFSIDSPDSLENIPEKWTPEVRHFCPSVPIILVGNKKDLRNDSSTIKELAKMKQSAVSNEDGMAMAEKIGAYGYMECSARTKEGVREVFELATKAALQTKKRKKKSGCEVL

SEQ ID NO: 86 - DNA, 576 bp, Ciona intestinalis
  CDS (1)..(576)
atgcaaaccataaaatgtgtggttgttggtgatggtgctgttggtaaaacctgccttcttatctcatacacaactaataagtttcctcaagagtatgtcccgactgtgtttgacaactatgcagttacagtaatgattggtggagaaccatataccttgggattatttgatacagcaggccaggaagattatgacagattacgacccctaagctacccccaaactgatgtcttcttagtttgcttttcggttgtttcaccatcatcatacgaaaatataaaagaaaagtgggtgccagaaatcactcaccattgtccaaagactccattcttgctggttggtacacaagttgatttaagggacgatgctgcaactatagaaaagttatctaaaaataaacaaaaagcaattactcaagatatgggtgataaacttgcaagggaattaaaagctgtaaaatatgttgaatgttcagctctgactcagaaaggattaaagaatgtatttgatgaagccatattagctgctttggaacctcctgaaccgaagcgtcgtcgacgttgtcaagtcttgtga

SEQ ID NO: 87 - protein, 191 aa, Ciona intestinalis
MQTIKCVVVGDGAVGKTCLLISYTTNKFPQEYVPTVFDNYAVTVMIGGEPYTLGLFDTAGQEDYDRLRPLSYPQTDVFLVCFSVVSPSSYENIKEKWVPEITHHCPKTPFLLVGTQVDLRDDAATIEKLSKNKQKAITQDMGDKLARELKAVKYVECSALTQKGLKNVFDEAILAALEPPEPKRRRRCQVL

SEQ ID NO: 88 - DNA, 579 bp, Ciona intestinalis
  CDS (1)..(579)
atgcaggcgatcaagtgtgttgtggttggagatggagctgttggtaaaacctgtttgctgatcagctacacaaccaatgctttccctggagaatatattcccactgtgtttgataactactctgccaatgtcatggtagatggccgccctgtcaacttgggattatgggatacagcagggcaggaggattacgacagacttcggcctctctcctacccacaaacggacgtttttctgatctgtttctcactcgtgtcaccagcctcattcgaaaacgtgcgcgcaaagtggtatccagaagtcgcacaccactgtccagatacaccggtcattctcgtgggaacaaaacttgatttacgtgacgaccaggaaaccatccaaaagctgaaagaaaagaaacttgccccaatcctctacccacaagggttgcagatggcgaaagaagtgaacgccgtaaagtacctggagtgctcggctctcacccaaaaaggcctgaaaaccgttttcgacgaggcgatccgcgccgtcctgtgccctgagcaaaagccgaagaaaaagaagccctgcgagcttttgtga

SEQ ID NO: 89 - protein, 192 aa, Ciona intestinalis
MQAIKCVVVGDGAVGKTCLLISYTTNAFPGEYIPTVFDNYSANVMVDGRPVNLGLWDTAGQEDYDRLRPLSYPQTDVFLICFSLVSPASFENVRAKWYPEVAHHCPDTPVILVGTKLDLRDDQETIQKLKEKKLAPILYPQGLQMAKEVNAVKYLECSALTQKGLKTVFDEAIRAVLCPEQKPKKKKPCELL

SEQ ID NO: 90 - DNA, 582 bp, Ciona intestinalis
  CDS (1)..(582)
atggctagcatgttaaggtgtgtagtggtaggagacggcgcagtgggtaagaccagtatgcttatcagttacacaaaagggggtttcccagacgaatatgttccaacgatacttgatcagtatgcggcaacgattactgtgggcggtacaccatatgtgttggaactcatagatacagcgggtcaagaggattatgacagattaagaccattgtcctacaacaaagccgacgttttccttgtttgttactctgttgtcgtgccttcttcgtttacaaacatcaaagaaacttggataccagagttaaaacaacactcaacaaaggtgccctatattttggttggaacgcaaaccgatcttcgggacgacccaagagttttacaggaactccacaaaaagaaacaaaaacctgttaatgttgaaagtgggcaacgtcgcgcggcgaagttgggggccgctgcttacaaagaatgctcggcagttacgatgaatggaattaaagatgtttttgacgaagcgatacacactgtgttgtacccagaggaaaaatctagcgagaaaaagaattgtacaatatcttaa

SEQ ID NO: 91 - protein, 193 aa, Ciona intestinalis
MASMLRCVVVGDGAVGKTSMLISYTKGGFPDEYVPTILDQYAATITVGGTPYVLELIDTAGQEDYDRLRPLSYNKADVFLVCYSVVVPSSFTNIKETWIPELKQHSTKVPYILVGTQTDLRDDPRVLQELHKKKQKPVNVESGQRRAAKLGAAAYKECSAVTMNGIKDVFDEAIHTVLYPEEKSSEKKNCTIS

SEQ ID NO: 92 - DNA, 579 bp, Ciona intestinalis
  CDS (1)..(579)
atgcaagcgataaagtgcgttgtggttggagatggagctgttggtaaaacctgtttgctgatcagctacacaactaacgctttccctggagaatatattcccactgtgtttgataactactctgccaatgtcatggtagatggccgccctgtcaacttgggattatgggatacagcaggacaggaggattatgacagactccgacctctctcctacccacaaaccgatgtttttctcatttgtttctctgtggcttctcccgcttcctacgaaaacgtgcgcgcaaagtggcacccggaggtcgcacaccactgcccggaaacgcccgtacttctcgtgggaacaaaacttgatttacgtgacgatgcggacactgtgaacaagctagctgagaaaaagctctccaccattactactacccaaggtttacaaatggcgaaggaactgggggcggttaaataccaagagtgctctgctctgacgcaaaaggggctgaaaaatgttttcgacgaagcgattcgggcggttcttaacccaacaagaagagtcgtccgaacgaagaactgcgaaattctatga

SEQ ID NO: 93 - protein, 192 aa, Ciona intestinalis
MQAIKCVVVGDGAVGKTCLLISYTTNAFPGEYIPTVFDNYSANVMVDGRPVNLGLWDTAGQEDYDRLRPLSYPQTDVFLICFSVASPASYENVRAKWHPEVAHHCPETPVLLVGTKLDLRDDADTVNKLAEKKLSTITTTQGLQMAKELGAVKYQECSALTQKGLKNVFDEAIRAVLNPTRRVVRTKNCEIL

SEQ ID NO: 94 - DNA, 582 bp, Ciona intestinalis
  CDS (1)..(582)
atgcagtccgtgaaatgtgttgtggttggagatggagctgttggtaaaacctgtttgctgatcagctacacaaccaatgctttccctggagaatatattcccactgtgtttgaaagctatgctgcaaatgttgtggtggatgggaacccagtgaacatcggtttatgggacacagctggccaggaagattacgataaacttcgaccgctatcatacccacagtcagatgtctttgtcatgtgcttctcgttggtaaacccaacatcttatgaaaacattgcagaaaaatggtatccggaagttcatgaacactgtcccgacatccccattgtactcgttgggacaaaactggatttacgtgaagacccagaaacactcaaaacgttgggtgagagaaatcttgttccagttaccaaaacccagggcctccagttggcgaaaaaagttggggcaaagaaatattttgagtgctcggcgcttactcgtgaaaacttagacgaactctttcttgaagcaatgcgcaatgccctgaaaggaccggacaaaattgtaaaagagaaaccaaattgtcaaattatctaa

SEQ ID NO: 95 - protein, 193 aa, Ciona intestinalis
MQSVKCVVVGDGAVGKTCLLISYTTNAFPGEYIPTVFESYAANVVVDGNPVNIGLWDTAGQEDYDKLRPLSYPQSDVFVMCFSLVNPTSYENIAEKWYPEVHEHCPDIPIVLVGTKLDLREDPETLKTLGERNLVPVTKTQGLQLAKKVGAKKYFECSALTRENLDELFLEAMRNALKGPDKIVKEKPNCQII

SEQ ID NO: 96 - DNA, 582 bp, Ciona intestinalis
  CDS (1)..(582)
atgcagagtgtaaaatgcgttgttgttggggatggtgcagttggaaaaacgagtatgataataacctatacaaccaacggatttccacaagataatgtaccatcggtattggataatcatacatcaaatatcatggtagatggaaagccaattaaccttagtttgaacgacacggcttcggcagaaaaatacgacaggcttcggcctctttcctttccacaaacggacgtttttctgatctgtttctcactggtgtcaccaccttcatttgaaaacgtgcgcgcaaagtggttcccagacgtacatcatcataatccgaccacacccgtggtacttgtcggcaccaagctcgatctacgagatgaccaggaattcgtcgcaaagctagaggagaagaatctatcacctattgcaacagcgcaaggtttgcagatgcaaaacgatatcagggctgtcaaatatttggagtgttctgccctcactcaagcagggttgcaagccgtatttattgaagccgctgaagctgccttgaacccagtttaccagcagcctccattgaaaaagaaatgtttggtcctataa

SEQ ID NO: 97 - protein, 193 aa, Ciona intestinalis
MQSVKCVVVGDGAVGKTSMIITYTTNGFPQDNVPSVLDNHTSNIMVDGKPINLSLNDTASAEKYDRLRPLSFPQTDVFLICFSLVSPPSFENVRAKWFPDVHHHNPTTPVVLVGTKLDLRDDQEFVAKLEEKNLSPIATAQGLQMQNDIRAVKYLECSALTQAGLQAVFIEAAEAALNPVYQQPPLKKKCLVL

SEQ ID NO: 98 - DNA, 579 bp, Ciona intestinalis
  CDS (1)..(579)
atgcagccagtcaaaatagtcgtcgttggagacggagctgtcggaaaaacatgtatgtgcattacttatgcaaacggggtatttcctagtgactatgtgcccaccatattcgacaactatgcagcaacaagcacgtttgagggaatttcctataacttagcactctgggacacggcaggacaagaagaatatgacaggttgagaccgttgagttacccacgcaccaatgtttttctgttatgtttctcagtcgtttccccagcttcgtttttcagcatttcttcaaagtggcatcctgaagtcagtcaccattcacccaaaactccttgtattttaatcggaacaaagcaggatctcagagatgacgaagaaaccgtaaaaaagctgaagaatactgattcagccccgattcgatatgaacaaggagaagcgctagcaaagcaactgggagcagtcaaatacgtggagtgctctgcactgaagaaagtaggggtagactctgtattccaagacgctattagtgcagtgttaaatcctgctaaaccacctaaaccaacgaagaggtgcgtgttactgtaa

SEQ ID NO: 99 - protein, 192 aa, Ciona intestinalis
MQPVKIVVVGDGAVGKTCMCITYANGVFPSDYVPTIFDNYAATSTFEGISYNLALWDTAGQEEYDRLRPLSYPRTNVFLLCFSVVSPASFFSISSKWHPEVSHHSPKTPCILIGTKQDLRDDEETVKKLKNTDSAPIRYEQGEALAKQLGAVKYVECSALKKVGVDSVFQDAISAVLNPAKPPKPTKRCVLL

SEQ ID NO: 100 - DNA, 585 bp, Ciona intestinalis
  CDS (1)..(585)
atgcagtctataaaattggtcgtggtgggcgatggtgccgtgggaaaaacgtgtctacttatcagctacacggcgaatgcctttccaagggagtatgttccgaccgtgtttgaaaactacatggcaaatatcacggtcaacaatcagcaaatttgcttaagtctttgggataccgctggtcaagaggattttgacaggttgagaccgctttcatatccagacaccgatgtctttgttctctgcttctcgataatttctccaacctcctttgaaaatctccagcacaaatggttgcccgagttacgagaacattgtcctaatgtgcccatcctgctagtgggtacgaagcttgacttgagagaagacaccgaaattctacaacagctttcctcgaaaaatctaaaaccaataacaccagaagaaggggcgaaaatggcgaaagatattaaagcagttaaatatttagagtgttctgctctaactcaggagtgtctcagccaagtatttgatgacgctgttattgcagtgctaaacccatcacacttttcaagtaacaatgacaacagctgttgtaagatcgtttaa

SEQ ID NO: 101 - protein, 194 aa, Ciona intestinalis
MQSIKLVVVGDGAVGKTCLLISYTANAFPREYVPTVFENYMANITVNNQQICLSLWDTAGQEDFDRLRPLSYPDTDVFVLCFSIISPTSFENLQHKWLPELREHCPNVPILLVGTKLDLREDTEILQQLSSKNLKPITPEEGAKMAKDIKAVKYLECSALTQECLSQVFDDAVIAVLNPSHFSSNNDNSCCKIV

SEQ ID NO: 102 - DNA, 645 bp, Zea mays
  CDS (1)..(645)
atggcgtccagcgcctctcggttcatcaagtgcgtcacggtcggcgacggtgccgtgggcaagacatgtatgctcatctgctacaccagcaacaagttccccactgactacatacctacggtgttcgacaatttcagtgcaaatgtagttgtggatggcaccactgtgaatttgggcctttgggataccgctgggcaggaagattacaaccgcctgaggcctctaagctaccgaggtgcagatgttttcgtgcttgcattctcacttgtgagccgagctagctatgagaatatcatgaagaagtggataccagagcttcaacattatgcacctggggtgcccgttgttttggcaggcacaaaattggatcttcgtgaagacaagcactacttgatggaccatcctggattggtgcctgttaccactgcacagggggaggaacttcgtagacaaattggtgctatgtattacattgaatgcagctcaaagacacagcagaatgtcaaagctgtgttcgatgctgccatcaaggtagtaatccagcctccaactaaaataagagaaaagaagaagaaaaaatcacgcaaaggatgttctatgatgaacatcttcggtggaagaaaaatgctatgcttcaagtcctga

SEQ ID NO: 103 - protein, 214 aa, Zea mays
MASSASRFIKCVTVGDGAVGKTCMLICYTSNKFPTDYIPTVFDNFSANVVVDGTTVNLGLWDTAGQEDYNRLRPLSYRGADVFVLAFSLVSRASYENIMKKWIPELQHYAPGVPVVLAGTKLDLREDKHYLMDHPGLVPVTTAQGEELRRQIGAMYYIECSSKTQQNVKAVFDAAIKVVIQPPTKIREKKKKKSRKGCSMMNIFGGRKMLCFKS

SEQ ID NO: 104 - DNA, 663 bp, Zea mays
  CDS (1)..(663)
atgagcgcggcggcagcggcggcggcgagctcggtcaccaagttcatcaagtgcgtcacggtcggcgatggggccgtcgggaagacctgcatgctcatctgctacacctgcaacaagttccccacggattacatccccaccgtatttgacaacttcagcgccaatgtctccgtgggtgggagcatcgtcaacttgggcctctgggacacggcaggccaggaggattacagcaggttgaggcctctcagctacaggggtgctgatgtgttcatcctctccttctccctggtcagcagggcgagctatgagaacgtcctgaagaagtggatgccagagcttcgccgattttcacctactgttcctgtagttcttgttggaaccaaactagatctccgtgaagacagatcttaccttgctgaccattctgctgcttccatcatctctactgaacagggagaagagctcaggaagcagataggtgctgtggcgtacatagaatgcagctcaaagacacagaggaacgtaaaggctgtgttcgacactgcaattaaagtagtgctgcaaccaccgaggagaagagaagttaccaggaagaaaatgaagacaagttcgaatcagtctctgagaagatacctctgtggaagcggatgtttcacatcgtaa

SEQ ID NO: 105 - protein, 220 aa, Zea mays
MSAAAAAAASSVTKFIKCVTVGDGAVGKTCMLICYTCNKFPTDYIPTVFDNFSANVSVGGSIVNLGLWDTAGQEDYSRLRPLSYRGADVFILSFSLVSRASYENVLKKWMPELRRFSPTVPVVLVGTKLDLREDRSYLADHSAASIISTEQGEELRKQIGAVAYIECSSKTQRNVKAVFDTAIKVVLQPPRRREVTRKKMKTSSNQSLRRYLCGSGCFTS

SEQ ID NO: 106 - DNA, 645 bp, Zea mays
  CDS (1)..(645)
atggcgtccagcgcctctcggttcatcaagtgcgtcacggtcggcgacggtgccgtgggcaagacatgtatgctcatctgctacaccagcaacaagttccccactgattacatacccacggtgttcgacaatttcagtgcaaatgtcgttgtggatggcaccacggtgaatttgggcctgtgggataccgcagggcaggaagattacaaccgactgaggcctctaagctaccgtggtgcagatgttttcgtgcttgcattctcacttgtgagtcgagctagctatgagaatatcatgaagaagtggataccggagcttcagcattatgcacgtggggtgcctgttgtgttggtaggcacaaaatttgatcttcgtgaagacaagcactacttgatggaccatcctgggttggtgcctgttaccacagcacaaggggaggaacttcgtagacaaattggtgctatgtattacatcgaatgcagttcgaagacacagcagaatgtcaaagctgtgttcgatgctgccatcaaggttgtaatccagcctccaactaaactaagagaaaagaagaaaaagaaatcacgcaagggatgttcgatggtgaacatcttatctggaagaaaaatgctatgcttcaagtcctga

SEQ ID NO: 107 - protein, 214 aa, Zea mays
MASSASRFIKCVTVGDGAVGKTCMLICYTSNKFPTDYIPTVFDNFSANVVVDGTTVNLGLWDTAGQEDYNRLRPLSYRGADVFVLAFSLVSRASYENIMKKWIPELQHYARGVPVVLVGTKFDLREDKHYLMDHPGLVPVTTAQGEELRRQIGAMYYIECSSKTQQNVKAVFDAAIKVVIQPPTKLREKKKKKSRKGCSMVNILSGRKMLCFKS

SEQ ID NO: 108 - DNA, 639 bp, Zea mays
  CDS (1)..(639)
atgagcgtgaccaagttcatcaagtgcgtcacggtgggggacggcgcggtgggcaagacctgcatgctcatctgctacaccagcaacaagttccccacggattacatccccacggtgttcgacaacttcagcgccaacgtctccgtggacggcagcatcgtcaacctgggcctctgggacactgcaggacaagaggactacagcagattgcggccactgagctacaggggcgcggacgtgttcgtgctggccttctccttgatcagcagggcgagctatgagaacgtccttaagaagtgggtgccagagcttcgcagattcgcgcccgacgtcccggtcgttcttgtcgggaccaagttagatctccgtgaccacagggcctaccttgctgaccatcctggagcgtcgacgatcacgacggcacagggcgaagaactgaggaggcagatcggcgctgcggcttacatcgagtgcagttccaaaacgcagcagaatgtcaagtcggtcttcgacacagccatcaaagtggtccttcagcccccgcggaggagggaggcgacgcctgccaggaggaagaacaggcgtggctccgggtgctctatcatgaacctcatgtgtggcagcacgtgcgctgcttag

SEQ ID NO: 109 - protein, 212 aa, Zea mays
MSVTKFIKCVTVGDGAVGKTCMLICYTSNKFPTDYIPTVFDNFSANVSVDGSIVNLGLWDTAGQEDYSRLRPLSYRGADVFVLAFSLISRASYENVLKKWVPELRRFAPDVPVVLVGTKLDLRDHRAYLADHPGASTITTAQGEELRRQIGAAAYIECSSKTQQNVKSVFDTAIKVVLQPPRRREATPARRKNRRGSGCSIMNLMCGSTCAA

SEQ ID NO: 110 - DNA, 594 bp, Zea mays
  CDS (1)..(594)
atgagcgcgtccaggttcataaagtgcgtcacggtcggggacggcgccgtcggcaagacctgcatgctcatctcctacacctccaacaccttccccaccgactatgttccgacagtgtttgataacttcagtgccaacgttgtggttgatggtaatactgtcaacctcggcctctgggacactgcaggtcaagaggattacaacagactgagaccactgagctatcgtggagctgatgtttttcttctggctttctcactgatcagtaaggccagctatgagaatgtttcgaagaagtggatacctgaactgaagcattatgcacctggtgtgccaattattctcgtagggacaaagcttgatcttcgagacgacaagcagttctttgtggaccatcctggtgctgtccctatcactactgctcagggagaggagctaagaaagcaaataggcgctccatactacatcgaatgcagctcgaagacccaactaaacgtgaagggcgtcttcgatgcggcgataaaggttgtgctgcagccgcctaaggcgaagaagaagaaaaaggtgcagaggggggcgtgctccattttgtga

SEQ ID NO: 111 - protein, 197 aa, Zea mays
MSASRFIKCVTVGDGAVGKTCMLISYTSNTFPTDYVPTVFDNFSANVVVDGNTVNLGLWDTAGQEDYNRLRPLSYRGADVFLLAFSLISKASYENVSKKWIPELKHYAPGVPIILVGTKLDLRDDKQFFVDHPGAVPITTAQGEELRKQIGAPYYIECSSKTQLNVKGVFDAAIKVVLQPPKAKKKKKVQRGACSIL

SEQ ID NO: 112 - DNA, 594 bp, Zea mays
  CDS (1)..(594)
atgagcgcgtctcggttcatcaagtgcgtcaccgtgggggacggtgccgtcggaaagacctgcatgctcatctcctacacatccaacactttccccactgactatgttccaactgtgttcgacaacttcagtgccaatgttgtggttgacgggagcactgtcaacttgggtctgtgggatacagcaggacaagaagattacaatagactgcgtccgttgagctatcgtggtgctgatgtttttctgctcgccttttctcttatcagcaaagcaagctatgagaatgtctctaagaagtgggttcctgaattaaggcactatgctcctggcgtgcccataatccttgttgggacaaaacttgatctgcgtgatgataagcagttttttgttgatcaccctggtgctgttccaatttccactgcccagggcgaagagctgaggaagctaattggtgctgccgcctacatcgaatgcagttcaaaaatccagcagaacataaaagcagtgtttgacgcagcaattaaggtggttctccagccaccaaagcaaaagaagaggaagaagaaggtgcagaagggatgcaccattttgtaa

SEQ ID NO: 113 - protein, 197 aa, Zea mays
MSASRFIKCVTVGDGAVGKTCMLISYTSNTFPTDYVPTVFDNFSANVVVDGSTVNLGLWDTAGQEDYNRLRPLSYRGADVFLLAFSLISKASYENVSKKWVPELRHYAPGVPIILVGTKLDLRDDKQFFVDHPGAVPISTAQGEELRKLIGAAAYIECSSKIQQNIKAVFDAAIKVVLQPPKQKKRKKKVQKGCTIL

SEQ ID NO: 114 - DNA, 648 bp, Zea mays
  CDS (1)..(648)
atggcctccagcgcctcccggttcatcaagtgcgtcacagtgggggacggcgccgtgggaaagacctgcatgctcatctgctacaccagcaacaagttccccactgattacatacccactgtcttcgataacttcagtgcaaacgtggtagtcgacggtaccacggtgaatttgggcctttgggatactgcagggcaggaagattacaacagactgaggccactgagctaccgcggagcagatgtgttcgtgctcgccttctcgcttgtcagccgagctagctacgagaatgttatgaagaagtggctaccggagcttcagcattatgcaccgggtgtccccatagtgttggccggaactaaattggatcttcgtgaagacaggcactacttagttgaccatcctggtgcggtacctgttactacagcacagggggaggaactgcgcaagcacattggcgcaacttgctacatcgaatgcagctcaaaaactcagcagaatgtgaaagctgtgtttgatgctgccatcaaggtagtaatcaggcctccgacgaagcagcgagaaaggaagaaaaagaaagaacggcgaggatgctcaatattctgcagccgtatcatgcacgcaagaagactaggatgcttcaagtga

SEQ ID NO: 115 - protein, 215 aa, Zea mays
MASSASRFIKCVTVGDGAVGKTCMLICYTSNKFPTDYIPTVFDNFSANVVVDGTTVNLGLWDTAGQEDYNRLRPLSYRGADVFVLAFSLVSRASYENVMKKWLPELQHYAPGVPIVLAGTKLDLREDRHYLVDHPGAVPVTTAQGEELRKHIGATCYIECSSKTQQNVKAVFDAAIKVVIRPPTKQRERKKKKERRGCSIFCSRIMHARRLGCFK

SEQ ID NO: 116 - DNA, 576 bp, Acyrthosiphon pisum
  CDS (1)..(576)
atgcagaccatcaagtgcgtggttgttggtgatggagctgttggtaagacttgtctgctcatatcgtacacgacaaacaagtttccttcagaatatgtaccgactgtttttgacaattatgcagtgaccgttatgattggcggagagccatacacattaggtttatttgatacagcaggtcaggaagattatgatcgcctcagacctttgagttatccacaaactgatgtgtttcttgtttgtttctccgtggtttcaccatcttcgtttgaaaatgtcaaagaaaaatgggttccagagataacgcatcactgtcaaaaaacaccattcctgttggttggcacacaaatagaccttagagaagatgccacaactgtagagaaactagccaaaaataaacaaaaatcaatatcatctgaacaaggagagaagctagctaaagaacttaaagctgtaaaatatgttgaatgctcagcacttacacaaaaaggactaaaaaatgtatttgatgaagctattcttgcagctttagagcctcctgagccagtcaagaagaggaagtgtgttatattgtaa

SEQ ID NO: 117 - protein, 191 aa, Acyrthosiphon pisum
MQTIKCVVVGDGAVGKTCLLISYTTNKFPSEYVPTVFDNYAVTVMIGGEPYTLGLFDTAGQEDYDRLRPLSYPQTDVFLVCFSVVSPSSFENVKEKWVPEITHHCQKTPFLLVGTQIDLREDATTVEKLAKNKQKSISSEQGEKLAKELKAVKYVECSALTQKGLKNVFDEAILAALEPPEPVKKRKCVIL

SEQ ID NO: 118 - DNA, 588 bp, Drosophila melanogaster
  CDS (1)..(588)
atgtcaaccggaaggcccataaagtgtgtagtcgttggtgacggcaccgtcggaaagacctgcatgctaatctcctacacgacagactgctttcccggcgaatatgtgcccacagtcttcgacaactactcggcgcccatgcaagtggacacaatacaggtctcgctgggactgtgggatacggcgggtcaggaggactacgaccgcctgagaccgctatcctacccgcagacagacgttttcctgatatgctacagcgtggcgagtccctcgtcctttgagaacgtcacctcgaaatggtatccggagataaagcaccactgtcccgatgcgcccatcattctagttggcaccaaaatcgatttgcgcgaagatcgagagacactcagcggcctggcagagcagggactgacgccgctgaagcgcgagcagggccagaagctggcaaacaagatacgcgctgtgaaatacatggagtgctccgccttgacgcagcgcggtctcaagccggtgttcgaggaagcggtgcgcgcggtgctcagaccagagccgctaaagcgacgccagcgaaagtgtttaataatgtaa

SEQ ID NO: 119 - protein, 195 aa, Drosophila melanogaster
MSTGRPIKCVVVGDGTVGKTCMLISYTTDCFPGEYVPTVFDNYSAPMQVDTIQVSLGLWDTAGQEDYDRLRPLSYPQTDVFLICYSVASPSSFENVTSKWYPEIKHHCPDAPIILVGTKIDLREDRETLSGLAEQGLTPLKREQGQKLANKIRAVKYMECSALTQRGLKPVFEEAVRAVLRPEPLKRRQRKCLIM

SEQ ID NO: 120 - DNA, 576 bp, Strongylocentrotus purpuratus
  CDS (1)..(576)
atgcagacgataaaatgtgtagtagtaggggatggagctgtgggaaagacctgtctacttatctcatatacaacaaataaattcccttcagaatatgtaccaacggttttcgataattatgcagtaactgttatgatcggtggagagccgtacacgttgggtctctttgatacagcaggacaagaagattacgacagacttcgacctctcagctacccccagacggatgtcttcctcgtctgtttttcagttgtagcgccatcttcatttgaaaatgtcaaagaaaagtgggtaccagagatcacccaccactgtcagaaaacaccattcctgctggtggggacccagatagatctgcgtgacgacccagccaccattgagaagctcatgaagaacaagcagaagcccacgacgggagaggctggtgagaggatggccaaagagctgcgtgccgttaaatacgttgagtgctctgcacttacacagaaaggactaaagaacgtctttgacgaggccatcctagcggctcttgagccccctgaaccagtcaagaagaagaggtgtcgactcctttaa

SEQ ID NO: 121 - protein, 191 aa, Strongylocentrotus purpuratus
MQTIKCVVVGDGAVGKTCLLISYTTNKFPSEYVPTVFDNYAVTVMIGGEPYTLGLFDTAGQEDYDRLRPLSYPQTDVFLVCFSVVAPSSFENVKEKWVPEITHHCQKTPFLLVGTQIDLRDDPATIEKLMKNKQKPTTGEAGERMAKELRAVKYVECSALTQKGLKNVFDEAILAALEPPEPVKKKRCRLL

SEQ ID NO: 122 - DNA, 579 bp, Strongylocentrotus purpuratus
  CDS (1)..(579)
atggctgctataaggaaaaagttggttatcgttggagatggtgcttgtggaaagacgtgtctgctcatagtatttagcaaagaccagttccctgaagtctacgtcccaactgtgtttgagaactatgtagctgatatagaagtagacggtaaacaagttgagttggcattatgggatacagcaggtcaagaagactacgacagactgagaccgctctcatatccagacacagacgttatactcatgtgcttttcaattgacaacccagacagtttagaaaacatcccagaaaaatggacaccagaggtgaagcacttttgccctaatgtacctgtcatcttggtcggtaacaagaaagatcttcgaaatgatgatgccacaaaacgggaactgagtaagatgaagcaggaaccggtgaaatttaatgatgcccagaccatgtcagataagatcaacgcctacaaatacctagaatgctcagccaagtctaacgatggtgtccgggaagtgtttgagacggcaaccagagcagcactacaagtcaaaaagaagaagtcatcaaaatgcagcatcttttaa

SEQ ID NO: 123 - protein, 192 aa, Strongylocentrotus purpuratus
MAAIRKKLVIVGDGACGKTCLLIVFSKDQFPEVYVPTVFENYVADIEVDGKQVELALWDTAGQEDYDRLRPLSYPDTDVILMCFSIDNPDSLENIPEKWTPEVKHFCPNVPVILVGNKKDLRNDDATKRELSKMKQEPVKFNDAQTMSDKINAYKYLECSAKSNDGVREVFETATRAALQVKKKKSSKCSIF

SEQ ID NO: 124 - DNA, 582 bp, Strongylocentrotus purpuratus
  CDS (1)..(582)
atggctgcgattaggaaaaagttggtcatcgttggagatggtgcttgtggaaagacatgtctgctcatagtatttagcaaagaccagttccctgaagtctacgtcccaacagtatttgagaactatgtagctgatatcgaagtagatagcaaacaggttgaattagcattatgggatacagcaggtcaggaagactacgacagactcagaccgctctcatatccagacacagacgttatactcatgtgctttgctatcgacaacccagacagtttggagaacatcccggagaaatggacaccagaggtcaagcatttctgtcccaacgtgcccatcatcctggtgggtaacaagaaggacctccgtaacgacgataacaccaagatggagctgcagcggacgaagcagacccccgtcacgtacgacgaaggccaccagatgtccgtcaagatcaatgccgccaagtacatggagtgctcggccaagaccaacgacggggtcagggaggtctttgagacggccacaagggcagcactgcagagtaagaagcgcaagaagaagctctcatgcaagatcttctaa

SEQ ID NO: 125 - protein, 193 aa, Strongylocentrotus purpuratus
MAAIRKKLVIVGDGACGKTCLLIVFSKDQFPEVYVPTVFENYVADIEVDSKQVELALWDTAGQEDYDRLRPLSYPDTDVILMCFAIDNPDSLENIPEKWTPEVKHFCPNVPIILVGNKKDLRNDDNTKMELQRTKQTPVTYDEGHQMSVKINAAKYMECSAKTNDGVREVFETATRAALQSKKRKKKLSCKIF

SEQ ID NO: 126 - DNA, 609 bp, Strongylocentrotus purpuratus
  CDS (1)..(609)
atggctgcgattaggaaaaagttggtcatcgttggagatggtgcttgtggagcgacctgtctgctcacagtatttagcaaagaccagttccctgaagtctacgtcccaacagtatttgagagctatgaagcttatatagaagtagatagcaaacaggttgaattagcattatgggaaacagcaggtcaggaagcctacgacagaatgagatcgctctcatatccagacacagacgttatactcatgtgctttgatatctaccgtccaggcactttggtgaatatctgggagaaatggacaccagaggtcaagcatttctgtcccaacgtgcccatcatcctcgtgggtaacaagaaggaccttcgtaacgacgacaacaccaagatggagctgcagcagaccaagcagacccccgtcacgtacgacgaaggtcaccagatggcggtcaagatcaatgctgccaagtacatggagtgttcggccaagaccaacgatggggtgagggaggtctttgaaacggccacaagggcagcactgcagagcattgagagcattgagagcattgagagcaagaagcgcaagaagaagctttcatgcaagatcttctaa

SEQ ID NO: 127 - protein, 202 aa, Strongylocentrotus purpuratus
MAAIRKKLVIVGDGACGATCLLTVFSKDQFPEVYVPTVFESYEAYIEVDSKQVELALWETAGQEAYDRMRSLSYPDTDVILMCFDIYRPGTLVNIWEKWTPEVKHFCPNVPIILVGNKKDLRNDDNTKMELQQTKQTPVTYDEGHQMAVKINAAKYMECSAKTNDGVREVFETATRAALQSIESIESIESKKRKKKLSCKIF

SEQ ID NO: 128 - DNA, 585 bp, Anopheles gambiae
  Anopheles gambiae str. PEST
  CDS (1)..(585)
atgacgatcactggtacgagtaatggtggtggcggtggaatgcggcccctgaaggtaacgacggtcggcgacggtatggtcgggaagacctgcatgctcatcacctacacgcagaacgagttcccgagcgagtacgtcccgaccgtgttcgacaatcacgcgtgcaacattgtggtggacggggccgattacgcgctaacgctgtgggacacggccggccaggaagattacgaacggttgcgaccgctcagctatcccaacaccgactgtttcctcatctgctactccatatcgaaccgcacatctttcgataacgtgctgtccaagtggtacccggagataaggcattttgcaccctccgtaccgatcgtgcttgtcggcaccaagagcgatctgcgtgtgcccgggtcggagaagtttgtcaccacggccgagggcaagaagctgaagcacaaaatcaaagcctacgcgctggtggaatgttccgcgaagcggaagctcaaccttgccgaggtgtttgacgaggcggtgcgcgctgtcgagaagaaaccacacgccggaccgcggatgtgtacgatactatag

SEQ ID NO: 129 - protein, 194 aa, Anopheles gambiae
  Anopheles gambiae str. PEST
MTITGTSNGGGGGMRPLKVTTVGDGMVGKTCMLITYTQNEFPSEYVPTVFDNHACNIVVDGADYALTLWDTAGQEDYERLRPLSYPNTDCFLICYSISNRTSFDNVLSKWYPEIRHFAPSVPIVLVGTKSDLRVPGSEKFVTTAEGKKLKHKIKAYALVECSAKRKLNLAEVFDEAVRAVEKKPHAGPRMCTIL

SEQ ID NO: 130 - DNA, 600 bp, Magnaporthe grisea
  Magnaporthe grisea 70-15
  CDS (1)..(600)
atggccgcccctggggttcagtctttgaagtgtgtcgtcactggcgacggtgctgtcggaaagacatgccttctcatctcctacaccacaaacgccttccccggcgagtacatccccacagtattcgacaactactcggctagtgttatggtcgatggaaagcccatcagcttgggactttgggataccgctggacaggaggactacgacagactgaggccgctatcatacccgcagacagatgtcttcctaatttgcttctcgatcgttagcccgccgtcattcgacaacgtcaaggcgaagtggtacccagagatcgaccatcacgcgcccaacgtgcccatcatcctcgtcggaaccaagctcgatcttcgtgaagacccctccaccctcgagagtcttcgctccaagaggatggagcctgtttcgtacgaccaggcacttatctgcgcaaaggagattagggcgcacaagtaccttgagtgctctgcattgacgcaaaggaacctgaagagtgtgttcgatgaggccattagggctgtcctcaacccccgaccccagccggcgaaggttaagaagtcaaagtgcaccattctgtga

SEQ ID NO: 131 - protein, 199 aa, Magnaporthe grisea
  Magnaporthe grisea 70-15
MAAPGVQSLKCVVTGDGAVGKTCLLISYTTNAFPGEYIPTVFDNYSASVMVDGKPISLGLWDTAGQEDYDRLRPLSYPQTDVFLICFSIVSPPSFDNVKAKWYPEIDHHAPNVPIILVGTKLDLREDPSTLESLRSKRMEPVSYDQALICAKEIRAHKYLECSALTQRNLKSVFDEAIRAVLNPRPQPAKVKKSKCTIL

SEQ ID NO: 132 - DNA, 609 bp, Nasonia vitripennis
  CDS (1)..(609)
atgaagaagagaaacatcaccatgagttcaggtagaccaatcaagtgcgtggttgtgggagatggcacagtgggaaaaacttgtatgctgatatcttacacgacggacagctttcctggagaatacgtgcctacggtgtttgacaattactctgcaccaatggtagtggatggtattccagtaagccttggcttatgggatacagcaggtcaagaagattacgacaggctccgaccactctcttatccacagacagatgtgtttctcatttgtttttccgtgacaagtccatcatcgtttgagaatgtcaccagcaagtggtatccagaaataaaacatcactgtccagacgcaccaatgattcttgtgggaaccaaaattgatctgcgagatgatcgtgaaacattaactgccttggctgaacaagggctcagtgccattaaacgtgaacaaggacagaaattagctaataagattcgagctgttaaatatatggaatgttctgctttgacacaacgtggcttaaagcaagtgtttgatgaggctgttcgctcagtacttcgacctgaaccccaaaaacgcagacaacgaaggtgcatcgtgatgtaa

SEQ ID NO: 133 - protein, 202 aa, Nasonia vitripennis
MKKRNITMSSGRPIKCVVVGDGTVGKTCMLISYTTDSFPGEYVPTVFDNYSAPMVVDGIPVSLGLWDTAGQEDYDRLRPLSYPQTDVFLICFSVTSPSSFENVTSKWYPEIKHHCPDAPMILVGTKIDLRDDRETLTALAEQGLSAIKREQGQKLANKIRAVKYMECSALTQRGLKQVFDEAVRSVLRPEPQKRRQRRCIVM

SEQ ID NO: 134 - DNA, 576 bp, Nasonia vitripennis
  CDS (1)..(576)
atgcagacaataaagtgcgtggtggtcggagatggagctgtgggtaaaacttgcctgctgatttcctacacgacgaacaaatttccctccgagtatgtacctacagtcttcgacaactatgcagtcacagtgatgattggaggagagccttatactttaggactttttgatacagctggtcaggaagattatgatagacttagaccactgagctatcctcaaacagatgtttttctagtctgtttttcagtggtatcgccttcatcttttgaaaacgtaaaagagaagtgggtgccagaaataacgcatcactgtcaaaagacgccgttcttgctggtcggaacgcaaatcgatctgagggacgacgcggcgaccatcgagaagctcgcgaaaaacaaacagaagcctataacgggagaacagggagagaaactagcgaaggaacttaaagctgtgaaatacgtcgagtgcagtgcattgacgcagaaaggactaaaaaacgtttttgacgaagcgatcttagcagctctcgagcccccagaaccagtgaggagaaggcgatgcatcgttttgtag

SEQ ID NO: 135 - protein, 191 aa, Nasonia vitripennis
MQTIKCVVVGDGAVGKTCLLISYTTNKFPSEYVPTVFDNYAVTVMIGGEPYTLGLFDTAGQEDYDRLRPLSYPQTDVFLVCFSVVSPSSFENVKEKWVPEITHHCQKTPFLLVGTQIDLRDDAATIEKLAKNKQKPITGEQGEKLAKELKAVKYVECSALTQKGLKNVFDEAILAALEPPEPVRRRRCIVL

SEQ ID NO: 136 - DNA, 576 bp, Nasonia vitripennis
  CDS (1)..(576)
atgcaaacaatcaagtgcgtagttgtgggagatggtgcggtaggtaaaacctgcctgctgatctcctacactaccaataaatttccctccgaatatgtacctactgtattcgacaattatgcagtaacagtaatgatcggaggagatccctacaccctgggattatttgacacagctggtcaggaagattatgatcggctgcgtcctctaagctatccacaaacggatgtttttttagtctgtttttcagttgtatcgccttcatcatttgaaaatgtgaaagaaaaatgggtaccagaaataacacatcactgtcaaaggactccattcctgctggtaggcactcaagttgatttaagagacgacgttgctactattgaaaaactagcaaagaacaagcaaaagcctatatcagtggagcagggagaaaaacttgcaaaggaactgaaggccgtgaagtacgtcgaatgcagcgctcttactcagaaaggcttgaagaatgtatttgacgaagcaattttagctgcactggagccaccagagcctccgaagggtagaaagtgtttccttctgtaa

SEQ ID NO: 137 - protein, 191 aa, Nasonia vitripennis
MQTIKCVVVGDGAVGKTCLLISYTTNKFPSEYVPTVFDNYAVTVMIGGDPYTLGLFDTAGQEDYDRLRPLSYPQTDVFLVCFSVVSPSSFENVKEKWVPEITHHCQRTPFLLVGTQVDLRDDVATIEKLAKNKQKPISVEQGEKLAKELKAVKYVECSALTQKGLKNVFDEAILAALEPPEPPKGRKCFLL

SEQ ID NO: 138 - DNA, 579 bp, Nasonia vitripennis
  CDS (1)..(579)
atggcagctataaggaagaaattggtgatcgttggcgatggtgcctgtggtaaaacttgcttgctgattgtgttcagtaaggatcagtttcctgaggtgtatgtgcctactgtttttgaaaactatgtagctgatattgaagtagatggaaagcaagtcgagctcgccctgtgggatactgcagggcaagaagactacgacagacttcgcccactatcctatcctgacacagatgtcatcttgatgtgcttctccattgacagtcccgattcccttgagaacattccggaaaagtggacaccagaggtcaagcatttttgccctaatgtaccaatcattttggttggtaacaaaaaggatctgcgcaatgatccaagcaccatcaaggaacttggcaagatgaagcaggagcccgtcaagcccgaagaaggccgcgccatggctgaaaagatcagtgcttttgcctaccttgagtgctctgccaagagcaaggaaggtgtcagagaggtctttgaaacagcgaccagagctgcattacaggtcaagaagaagaagaagggaaggtgtaggctgctttaa

SEQ ID NO: 139 - protein, 192 aa, Nasonia vitripennis
MAAIRKKLVIVGDGACGKTCLLIVFSKDQFPEVYVPTVFENYVADIEVDGKQVELALWDTAGQEDYDRLRPLSYPDTDVILMCFSIDSPDSLENIPEKWTPEVKHFCPNVPIILVGNKKDLRNDPSTIKELGKMKQEPVKPEEGRAMAEKISAFAYLECSAKSKEGVREVFETATRAALQVKKKKKGRCRLL

SEQ ID NO: 140 - DNA, 561 bp, Aedes aegypti
  CDS (1)..(561)
atgacgatgggcaatatgcgtccgctaaaaatcaccactgtcggcgatggcatggtcggcaaaacgtgcatgctaattacctacacacaaaacgagttccccgtcgaatacgtgccaacggtgttcgataaccatgcctgcaatatcacagtcgacgagaaggaatatgccctcacactttgggacacggccggccaagaagactacgaaagactacgaccgctaagttacccaaatactgattgttttcttatatgttactccatatcaagtaaaacatctttcgataacgtgctatcgaagtggtaccccgagataaggcactatgcgccccacgtaccgattgtgctcgttggaaccaaaagcgacctccgagtacacggatcggaaaagtttgtcacaactgctgagggcaagaaactgaagcacaaaatcaaagcttactcactggtagaatgttccgctaagaagaaactcaacctcggggaagtgtttgacgaagccgtgcgagcggtggagaaaaagccccacgccaaaccacgtgtctgtacgatactctag

SEQ ID NO: 141 - protein, 186 aa, Aedes aegypti
MTMGNMRPLKITTVGDGMVGKTCMLITYTQNEFPVEYVPTVFDNHACNITVDEKEYALTLWDTAGQEDYERLRPLSYPNTDCFLICYSISSKTSFDNVLSKWYPEIRHYAPHVPIVLVGTKSDLRVHGSEKFVTTAEGKKLKHKIKAYSLVECSAKKKLNLGEVFDEAVRAVEKKPHAKPRVCTIL

SEQ ID NO: 142 - DNA, 624 bp, Aedes aegypti
  CDS (1)..(624)
atgtggtgtttttcatgcgtttctgctccagctaattcagaacaaatggcagccatccggaagaagctcgtaatcgtcggcgacggtgcctgcggtaagacgtgtctgctgatcgtcttcagcaaggatcagttcccggaggtttacgtccccaccgtgttcgagaactatgtggccgacatcgaggtcgacggaaaacaggttgaactagcgctatgggatactgccgggcaagaagactacgacagacttaggcccttgagctatccagacaccgatgtcatcctgatgtgtttctcggtcgattcaccagactcgctggaaaatattccggagaaatggactcctgaggttaaacatttttgtccaaacgtacccataatcttagttgggaacaagaaagatctcagaaacgaccctcacacgataaaggaattggccaaaatgaagcaggagccagtgaagccacaggaaggacgtgcaatggctgagaaaataaacgctttcgcttatttggaatgctcggccaagtcgaaagagggcgtacgtgaggtgttcgaaacagccaccagggccgcgttacaggtcaaaaagaagaagaagagtaaatgtgttttgctctaa

SEQ ID NO: 143 - protein, 207 aa, Aedes aegypti
MWCFSCVSAPANSEQMAAIRKKLVIVGDGACGKTCLLIVFSKDQFPEVYVPTVFENYVADIEVDGKQVELALWDTAGQEDYDRLRPLSYPDTDVILMCFSVDSPDSLENIPEKWTPEVKHFCPNVPIILVGNKKDLRNDPHTIKELAKMKQEPVKPQEGRAMAEKINAFAYLECSAKSKEGVREVFETATRAALQVKKKKKSKCVLL

SEQ ID NO: 144 - DNA, 579 bp, Aedes aegypti
  CDS (1)..(579)
atgcaggccatcaagtgcgtcgtagtcggagatggtgccgtgggtaagacctgtctgttgatcagctacacgaccaatgccttcccgggagaatacattccgaccgtgttcgacaactattcggccaacgtcatggtcgacgggaagccaatcaatctgggactgtgggatacggctggacaggaagattacgatcgtctccggccactttcctacccacagacggacgtgtttctcatatgcttctcgctggtaaatccggcctcgtttgaaaacgttcgggccaagtggtacccggaggtacgtcaccattgtccgaacataccgataatcctcgttggaaccaagctcgatcttcgggatgacaagcaaaccgtggataagctacgcgaaaagaagctctcgcccatcacctacccccagggattggccatggccaaggaaatcggtgccgtcaagtatttggaatgttctgccctgacacagaaggggctcaaaaccgttttcgacgaagcgatccgtgccgttctctgtcccatcataccggtgaaaaacaaacgtaaatgttcaattctgtaa

SEQ ID NO: 145 - protein, 192 aa, Aedes aegypti
MQAIKCVVVGDGAVGKTCLLISYTTNAFPGEYIPTVFDNYSANVMVDGKPINLGLWDTAGQEDYDRLRPLSYPQTDVFLICFSLVNPASFENVRAKWYPEVRHHCPNIPIILVGTKLDLRDDKQTVDKLREKKLSPITYPQGLAMAKEIGAVKYLECSALTQKGLKTVFDEAIRAVLCPIIPVKNKRKCSIL

SEQ ID NO: 146 - DNA, 624 bp, Anopheles gambiae
  Anopheles gambiae str. PEST
  CDS (1)..(624)
atgtggtgtctttcatgcgtctcttctccaactaattcagaaccaatggctgctataaggaaaaagcttgtgatcgtcggcgatggtgcctgcggtaaaacctgtctgctgatcgtcttcagcaaggatcagttcccggaggtgtacgtgccgaccgtgttcgaaaactacgtggccgacatcgaagtcgacggcaagcaggttgagctggcactgtgggatacggccgggcaagaagattacgacagactgaggccgctgagctacccagacaccgatgttattctcatgtgcttctctgtcgattcacccgactcgctggagaacatccccgaaaagtggacccctgaggtaaaacatttctgtcctaatgtacccatcatcttagtcggcaacaaaaaagatctcagaaatgacccacacacaataaaggaattggctaaaatgaagcaggagcccgtcaagccacaggagggacgtgcgatggccgaaaaaattaatgctttcgcttatttagagtgttcggccaaatcgaaggagggcgtgcgtgaagttttcgagactgctacgagagcagcgttacaggtgaaaaagaagaagaagagtaaatgtgttctgctctaa

SEQ ID NO: 147 - protein, 207 aa, Anopheles gambiae
  Anopheles gambiae str. PEST
MWCLSCVSSPTNSEPMAAIRKKLVIVGDGACGKTCLLIVFSKDQFPEVYVPTVFENYVADIEVDGKQVELALWDTAGQEDYDRLRPLSYPDTDVILMCFSVDSPDSLENIPEKWTPEVKHFCPNVPIILVGNKKDLRNDPHTIKELAKMKQEPVKPQEGRAMAEKINAFAYLECSAKSKEGVREVFETATRAALQVKKKKKSKCVLL

SEQ ID NO: 148 - DNA, 579 bp, Anopheles gambiae
  Anopheles gambiae str. PEST
  CDS (1)..(579)
atggctgctataaggaaaaagcttgtgatcgtcggcgatggtgcctgcggtaaaacctgtctgctgatcgtcttcagcaaggatcagttcccggaggtgtacgtgccgaccgtgttcgaaaactacgtggccgacatcgaagtcgacggcaagcaggttgagctggcactgtgggatacggccgggcaagaagattacgacagactgaggccgctgagctacccagacaccgatgttattctcatgtgcttctctgtcgattcacccgactcgctggagaacatccccgaaaagtggacccctgaggtaaaacatttctgtcctaatgtacccatcatcttagtcggcaacaaaaaagatctcagaaatgacccacacacaataaaggaattggctaaaatgaagcaggagcccgtcaagccacaggagggacgtgcgatggccgaaaaaattaatgctttcgcttatttagagtgttcggccaaatcgaaggagggcgtgcgtgaagttttcgagactgctacgagagcagcgttacaggtgaaaaagaagaagaagagtaaatgtgttctgctctaa

SEQ ID NO: 149 - protein, 192 aa, Anopheles gambiae
  Anopheles gambiae str. PEST
MAAIRKKLVIVGDGACGKTCLLIVFSKDQFPEVYVPTVFENYVADIEVDGKQVELALWDTAGQEDYDRLRPLSYPDTDVILMCFSVDSPDSLENIPEKWTPEVKHFCPNVPIILVGNKKDLRNDPHTIKELAKMKQEPVKPQEGRAMAEKINAFAYLECSAKSKEGVREVFETATRAALQVKKKKKSKCVLL

SEQ ID NO: 150 - DNA, 591 bp, Physcomitrella patens
  Physcomitrella patens subsp. patens
  CDS (1)..(591)
atgagcacttcacggtttatcaagtgcgtgactgttggagatggagctgtcgggaagacgtgcatgcttatttcatacaccagcaacacatttcctactgattacgttcctaccgtgtttgacaacttcagcgcaaatgtagtggtcgatggaaataccgtcaacctcgggttatgggatacagcaggtcaagaagattacaacaggcttcgtcctctgagttacaggggtgctgatgtttttctcctggcgttctccctcatcagcaaggctagttatgaaaacatatcaaagaagtggatcccggaactgagacattacgcgccatctgtgccaatcattctcgtcggaacaaaacttgatcttcgcgatgacaaacaattctttgctgatcatcctggagcggctccaataactacttctcaaggggaggagctcaggaagtcgattggggcggcctcgtacatagagtgcagctcaaagactcagcagaatgtaaaagcagtttttgacgcagcaatcaaggtggttctccaaccaccaaagcagaagaagaagaagaaaaaacaaaagaattgcgtcattctgtga

SEQ ID NO: 151 - protein, 196 aa, Physcomitrella patens
  Physcomitrella patens subsp. patens
MSTSRFIKCVTVGDGAVGKTCMLISYTSNTFPTDYVPTVFDNFSANVVVDGNTVNLGLWDTAGQEDYNRLRPLSYRGADVFLLAFSLISKASYENISKKWIPELRHYAPSVPIILVGTKLDLRDDKQFFADHPGAAPITTSQGEELRKSIGAASYIECSSKTQQNVKAVFDAAIKVVLQPPKQKKKKKKQKNCVIL

SEQ ID NO: 152 - DNA, 591 bp, Physcomitrella patens
  Physcomitrella patens subsp. patens
  CDS (1)..(591)
atgagcacatctcggtttatcaagtgcgttactgtaggagatggagcagtcggaaagacgtgcatgcttatttcttataccagcaatacatttcctactgattacgttcctaccgtttttgataacttcagcgcgaatgtcgttgtcgatggaaacactgtaaaccttggactatgggatacagcaggtcaggaagattataacaggcttcgacctctgagttacaggggtgctgatgtttttctactagcattctctcttatcagcaaagctagttatgagaacatctcaaagaagtggattcctgaactgagacactacgctccatctgtacctattatcctcgtcggaacgaagctagatcttcgagatgacaagcaatttttcgccgaccatcctggagcggctccgatcacaacctcccaaggtgaagaactcagaaaggcgattggagcagcctcttacattgagtgtagctctaagactcagcagaatgtgaaagcagtttttgatgctgccatcaaggttgttcttcagccacccaagcagaagaagaagaagaaaaaacaaaagaactgtgttattctctga

SEQ ID NO: 153 - protein, 196 aa, Physcomitrella patens
  Physcomitrella patens subsp. patens
MSTSRFIKCVTVGDGAVGKTCMLISYTSNTFPTDYVPTVFDNFSANVVVDGNTVNLGLWDTAGQEDYNRLRPLSYRGADVFLLAFSLISKASYENISKKWIPELRHYAPSVPIILVGTKLDLRDDKQFFADHPGAAPITTSQGEELRKAIGAASYIECSSKTQQNVKAVFDAAIKVVLQPPKQKKKKKKQKNCVIL

SEQ ID NO: 154 - DNA, 591 bp, Physcomitrella patens
  Physcomitrella patens subsp. patens
  CDS (1)..(591)
atgagcacttctcgctttatcaagtgcgttactgtaggagatggagctgtggggaagacgtgcatgcttatttcatataccagcaatacatttcctactgattacgtccctactgtattcgacaacttcagcgcgaatgtcgtggtcgatgggaataccgtcaacctgggactatgggatacagcaggtcaagaagattacaacagactccgacctcttagttacaggggtgccgatgtgtttttactggcattctctctcatcagcaaggctagttatgaaaacatctctaagaagtggattcctgaactaagacattatgcgccatctgtgcctatcatcctcgtgggaacgaaactagatcttcgagacgacaagcagttcttcgctgatcatccaggagcggctccaataactacctctcaaggtgaagagctcaggaggtcaattggagcagcctcatacattgagtgtagctcaaagactcagcagaatgtgaaagcagtttttgatgccgccataaaggtggttcttcagccacccaagcagaagaagaagaaaaagaagcaaaagaactgtgtcattctctaa

SEQ ID NO: 155 - protein, 196 aa, Physcomitrella patens
  Physcomitrella patens subsp. patens
MSTSRFIKCVTVGDGAVGKTCMLISYTSNTFPTDYVPTVFDNFSANVVVDGNTVNLGLWDTAGQEDYNRLRPLSYRGADVFLLAFSLISKASYENISKKWIPELRHYAPSVPIILVGTKLDLRDDKQFFADHPGAAPITTSQGEELRRSIGAASYIECSSKTQQNVKAVFDAAIKVVLQPPKQKKKKKKQKNCVIL

SEQ ID NO: 156 - DNA, 597 bp, Coprinopsis cinerea
  Coprinopsis cinerea okayama7#130
  CDS (1)..(597)
atggactcgcgacgaccagatttgaaacggaagctcgtcgttgttggggacggaggctgtggaaagacgtgtctgttaatcgtctacgccgagaaccgatttccagaggcctatataccaacagtgtttgagaactacgtgacccaggtgcagtttgaaggcaaattggttgagttggcgctatgggataccgcgggacaagaggaatacgaccgactacgaccgttatcgtaccctgaaagcaacgttatcctcatcgtcttctccatcgactttccaacatcacttgccaatgtccaggacaagtggtatcccgaggtagcccacttttgcgaaaataccccgctaatcctcgtgggcacaaagaccgatttgcgacgtgacgagcaaaccaggcgtatgctgagcgcacagggacaagcccctatcacccccgagcaaggcgccgccgttgcaaaggagatcggagctaaatacatcgaatgctcagcaaaggctggtaccggcgtacatgaagtctttgaactcgcgttgagggagagcatgaagggtcgctgggggaagattgtcaatcagaaacgatgcgttatcatctag

SEQ ID NO: 157 - protein, 198 aa, Coprinopsis cinerea
  Coprinopsis cinerea okayama7#130
MDSRRPDLKRKLVVVGDGGCGKTCLLIVYAENRFPEAYIPTVFENYVTQVQFEGKLVELALWDTAGQEEYDRLRPLSYPESNVILIVFSIDFPTSLANVQDKWYPEVAHFCENTPLILVGTKTDLRRDEQTRRMLSAQGQAPITPEQGAAVAKEIGAKYIECSAKAGTGVHEVFELALRESMKGRWGKIVNQKRCVII

SEQ ID NO: 158 - DNA, 597 bp, Coprinopsis cinerea
  Coprinopsis cinerea okayama7#130
  CDS (1)..(597)
atgtctgagattcgaaggaaattggtcatcgtaggagatggtgcttgtggaaagaggtcagtaaccgcccccgccccaccgccccgcagcacccaccccagcaacgccgtgtatgtgcccactgtgttcgagaactacgtcgccgatgtcgaggtggatgggaaacacgttgaactggcgttgtgggatacggccggccaggaagactacgaccgcctccgcccgctcagctaccccgactcgcacgtcatccttatctgtttcgccgtcgactcccccgactcgcttgataacgtccaggagaagtggatctcagaggtgatgcatttctgcgcggggttgccgataatcttggttggatgcaagaaggatctcagacgcgaccctcgtgtgattgaagagttgagaaagacgagccagcgaccggtctcgcccgaggagggtatggcggttgcacagaagattggagcacgacactacctcgaatgctcagccaagactggcgaaggcgtccgcgaagtcttccagtacgcaacccgagcagctctcctcagcaagcctggaaagagaaagcacagccactgcattgtcctctaa

SEQ ID NO: 159 - protein, 198 aa, Coprinopsis cinerea
  Coprinopsis cinerea okayama7#130
MSEIRRKLVIVGDGACGKRSVTAPAPPPRSTHPSNAVYVPTVFENYVADVEVDGKHVELALWDTAGQEDYDRLRPLSYPDSHVILICFAVDSPDSLDNVQEKWISEVMHFCAGLPIILVGCKKDLRRDPRVIEELRKTSQRPVSPEEGMAVAQKIGARHYLECSAKTGEGVREVFQYATRAALLSKPGKRKHSHCIVL

SEQ ID NO: 160 - DNA, 561 bp, Culex quinquefasciatus
  CDS (1)..(561)
atgacgatgggcaacatgcggccgctgaagatcacaaccgtcggggacggaatggtgggcaagacgtgcctgctaatcacctacgtccgcaacgagttccccagcgagtacgtcccgacggtgtttgacaaccacgcctgcaacatcaccgtggacgaaaaggagtacgccctcacgctgtgggacacggccggccaggaggactacgagcgactacggcccctcagctacccaaataccgattgttttctcatatgctactcaatatcgagcaagacatctttcgataacgttatttcaaaatggtacccagagataaggcactttgcccctaacgtgcccgttgtactcgtaggcaccaaaagtgatctccgagtgcacggctccgagaagtttgtcacgacggtcgagggcaaaaagctcaagcacaaaatcaaagcttactcactggtggagtgttccgcgaagaagaaactcaacctgggtgacgtgttcgacgaagccgtccgggccgtggagaagaaaccccaccacaagccacgtgtctgcacgatactctag

SEQ ID NO: 161 - protein, 186 aa, Culex quinquefasciatus
MTMGNMRPLKITTVGDGMVGKTCLLITYVRNEFPSEYVPTVFDNHACNITVDEKEYALTLWDTAGQEDYERLRPLSYPNTDCFLICYSISSKTSFDNVISKWYPEIRHFAPNVPVVLVGTKSDLRVHGSEKFVTTVEGKKLKHKIKAYSLVECSAKKKLNLGDVFDEAVRAVEKKPHHKPRVCTIL

SEQ ID NO: 162 - DNA, 588 bp, Culex quinquefasciatus
  CDS (1)..(588)
atggcctcgggaagacccattaagtgtgttgtagtcggcgacggaacggtcggcaagacttgcatgctcatttcatacactaccgacagctttcccggcgaatacgttcccacggtgttcgataactattccgcaccgatggtagtggacggagtacaagtctcgctgggactgtgggatacggctggacaggaggactacgaccggttacgaccactgtcgtacccacagactgacgtgttcctcatctgcttcagcgttgccagcccatcctcgttcgaaaatgtgacttccaaatggtacccagaaatcaaacatcactgcccggatgcaccaattattctagttggaaccaagattgatttgcgcgaggaccgggaaactctcagcgcactagccgagcagggcctgtcggcactcaaacgggaacagggacaaaaactagccaacaaagtacgcgccgtcaagtatatggaatgttcagcactgacccagcgtggcctcaagcaggtattcgacgaggccgtacgggctgtactccgaccggaacccctcaaacgacgtcaacgaaagtgtgttgtgatgtaa

SEQ ID NO: 163 - protein, 195 aa, Culex quinquefasciatus
MASGRPIKCVVVGDGTVGKTCMLISYTTDSFPGEYVPTVFDNYSAPMVVDGVQVSLGLWDTAGQEDYDRLRPLSYPQTDVFLICFSVASPSSFENVTSKWYPEIKHHCPDAPIILVGTKIDLREDRETLSALAEQGLSALKREQGQKLANKVRAVKYMECSALTQRGLKQVFDEAVRAVLRPEPLKRRQRKCVVM

SEQ ID NO: 164 - DNA, 588 bp, Acyrthosiphon pisum
  CDS (1)..(588)
atgtcagcaggacgaccaattaagtgtgtggttgttggcgatggtacagtgggcaagacttgtatgttaatatcgtatactaccgacagctttccaggagaatacgtacctactgtatttgataactactctgcacccatggtggttgacagtattcctgtcagccttggtctatgggatacggctggccaagaagattacgaccgtctaagaccactttcctatccacagactgacgtatttttggtctgctttagtgttgctagtccatcttcttttgaaaatgtggtttccaaatggtatccggaaattaaacatcactgtccagatgctcctatgattttagttggcacgaaaatagatttaagagaagacaaagaaacattaaatgttttgtctgaacaaggactgtccccaatcaaacgtgaacagggacaaaagttggccaataaaataagagctgtaaaatatctcgaatgttctgcattgactcaaagaggattaaaactggtatttgatgaagccgtaagagccgttttacgaccagtaccactcaaacaccagcaaaggaaatgcactatagcttag

SEQ ID NO: 165 - protein, 195 aa, Acyrthosiphon pisum
MSAGRPIKCVVVGDGTVGKTCMLISYTTDSFPGEYVPTVFDNYSAPMVVDSIPVSLGLWDTAGQEDYDRLRPLSYPQTDVFLVCFSVASPSSFENVVSKWYPEIKHHCPDAPMILVGTKIDLREDKETLNVLSEQGLSPIKREQGQKLANKIRAVKYLECSALTQRGLKLVFDEAVRAVLRPVPLKHQQRKCTIA

SEQ ID NO: 166 - DNA, 579 bp, Acyrthosiphon pisum
  CDS (1)..(579)
atgcaagccatcaagtgtgtcgtagtcggcgatggagcggttggtaaaacatgtttactcattagttataccagcaatgcatttcctggagaatacatacccactgtatttgacaactattcggccaatgttatggttgatggaaaacctataaacttaggattgtgggatactgctggtcaagaagattatgataggcttaggcctctttcatatccacaaacagatgtgtttcttatatgtttttcactagtaaatcctgcatcatttgaaaatgtgcgggcgaaatggtatcctgaagttcgacaccattgtccaagtactccaattattttagttggtactaaacttgatttacgagaagataaagaaacaattgataaactcaaagaaaaaaagttaactgctattacatatccacagggtttatcaatggccaaagaaattggagcagtgaaatacttggaatgtagtgctttgactcaaaaaggtctaaaaattgtatttgatgaagccattagagcagttttatgtcctgtactgccagttaagcctaaacgtaaatgcacaataatttaa

SEQ ID NO: 167 - protein, 192 aa, Acyrthosiphon pisum
MQAIKCVVVGDGAVGKTCLLISYTSNAFPGEYIPTVFDNYSANVMVDGKPINLGLWDTAGQEDYDRLRPLSYPQTDVFLICFSLVNPASFENVRAKWYPEVRHHCPSTPIILVGTKLDLREDKETIDKLKEKKLTAITYPQGLSMAKEIGAVKYLECSALTQKGLKIVFDEAIRAVLCPVLPVKPKRKCTII

SEQ ID NO: 168 - DNA, 579 bp, Acyrthosiphon pisum
  CDS (1)..(579)
atggcggccattcgaaaaaaactcgtcatcgttggtgacggtgcctgcggaaaaacttgtctgctcattgtgttttccaaagatcaattcccagaagtttatgtacctaccgtatttgagaactatgtagctgatatagaagtagatggcaaacaagtagaactagcactgtgggatacagcaggtcaagaagattatgatagactaagaccattgtcctatcctgacacggatgttatcctcatgtgtttctccatagattcaccagattcattagagaatatcccagagaaatggacaccggaagtgaaacatttctgtcctaatgtgccgattatattggttggtaacaaaaaagacttgcgtaatgatccaaatactattcgcgagttgagcaaaatgaaacaagagcccgtgaggccagaagaggggcgagcaatggccgaaaagataaatgcatttgcttatttggaatgttcagctaaaagtaaggagggtgtccgtgaagtatttgaaacttcaactagagcagctttacaggttaaaaagaaaaagaaggggcgatgccgtctactttaa

SEQ ID NO: 169 - protein, 192 aa, Acyrthosiphon pisum
MAAIRKKLVIVGDGACGKTCLLIVFSKDQFPEVYVPTVFENYVADIEVDGKQVELALWDTAGQEDYDRLRPLSYPDTDVILMCFSIDSPDSLENIPEKWTPEVKHFCPNVPIILVGNKKDLRNDPNTIRELSKMKQEPVRPEEGRAMAEKINAFAYLECSAKSKEGVREVFETSTRAALQVKKKKKGRCRLL

SEQ ID NO: 170 - DNA, 579 bp, Acyrthosiphon pisum
  CDS (1)..(579)
atggcagcaatccgtaagaaacttgtcatcgtcggcgacggtgcctgcggaaaaacttgtctgctcattgtgttttccaaagatcaattcccagaagtatatgttcccactgtgtttgagaactatgtagctgatatagaagtcgatggcaaacaagtagaattagcactgtgggatacagcgggtcaagaagattatgatagactaagaccattgtcctatcctgacacggatgttatcctcatgtgtttctccatagattcaccagattcgttagagaatatcccagagaaatggacaccggaagtgaaacatttctgtccaaatgtgccgattatattggttggtaacaaaaaagacttgcgtaatgatccaaatacgattcgcgagttgaacaagatgaaacaagagcccgtgaggccagaagaggggcgagcaatggccgaaaagatcaatgcatttgcttatttggaatgttcagctaaaagcaaagaaggagttcgtgaagtttttgaaacatcaacaagagctgcactacaagtcaagaaaaagaagaaaggcaaatgtgccttgttgtaa

SEQ ID NO: 171 - protein, 192 aa, Acyrthosiphon pisum
MAAIRKKLVIVGDGACGKTCLLIVFSKDQFPEVYVPTVFENYVADIEVDGKQVELALWDTAGQEDYDRLRPLSYPDTDVILMCFSIDSPDSLENIPEKWTPEVKHFCPNVPIILVGNKKDLRNDPNTIRELNKMKQEPVRPEEGRAMAEKINAFAYLECSAKSKEGVREVFETSTRAALQVKKKKKGKCALL

SEQ ID NO: 172 - DNA, 576 bp, Acyrthosiphon pisum
  CDS (1)..(576)
atgtctcctattaagaagaaagtagtgatcgtcggtgacggcgagagtggtaagacatgcctattgcgcgtgttttttgaggatattttcccagaagtatacgtgccaactgtgtttgactactattcaactgtgatcgaagttgaagggaaaaaggtggcgctcgacctatgggacactgctggtcaagaggattatgacagactgcgaccactgtcatatggggccgctgatgtagtgatcatatgctattcaatcgatactcccaaatcgttgattaacgtaattgataaatgggtgccggaagtgcggtatttttgcaaggaagtgccggtgatattggttggcaataagaaggacctccgcgatagcccgagaaaaactaccattcggatacctgaacataatgtcatgacaaccaaagaaattggtcaatcagtggccgaagatatcaaagctttcgcatttttagaatgttcttcgaagaccaaggaaggagtccgtgatgttttcgttgccacagtgaaggcgacaagaaggacttccaaacatagtacgcagtgtattttactttaa

SEQ ID NO: 173 - protein, 191 aa, Acyrthosiphon pisum
MSPIKKKVVIVGDGESGKTCLLRVFFEDIFPEVYVPTVFDYYSTVIEVEGKKVALDLWDTAGQEDYDRLRPLSYGAADVVIICYSIDTPKSLINVIDKWVPEVRYFCKEVPVILVGNKKDLRDSPRKTTIRIPEHNVMTTKEIGQSVAEDIKAFAFLECSSKTKEGVRDVFVATVKATRRTSKHSTQCILL

SEQ ID NO: 174 - DNA, 612 bp, Acyrthosiphon pisum
  CDS (1)..(612)
atgggagccgaatcacattacagcgacaccattagatcgtccaagaaatgcagcaagttgaggccgttgaagataaccgcggtcggcgatgggatggtcggaaaaacttgcatgctcatcacctacacgaccaagcaatttcctaccgaatacgtgcctaccgtattcgacaattatgcagagaacatggttatggatggtcaagagtacaacatgtgtctgtgggatactgccggccaagaagattacgaaagacttaggccactgtcttatcctaatacggattgttttctactttgctattcagtcggtagtcggagttcattcgaaaacattgccagtaaatggcatccggaaattcaacaccactgtccgaaaatacctgtgatattgatcggtacgaaaacggatttaaggctgagccaaaacgactgtataacacggaaaaagggcaagaaaatgatgaaaaagatcggggccgtcaagtacctggagtgttcagctctgaccaacgaagggttggacaccatattcacggaatcggtccgcgcggccatcgaaaggccaagaaaaaactgtttcgggttccctttcatccaatgctgtaaatag

SEQ ID NO: 175 - protein, 203 aa, Acyrthosiphon pisum
MGAESHYSDTIRSSKKCSKLRPLKITAVGDGMVGKTCMLITYTTKQFPTEYVPTVFDNYAENMVMDGQEYNMCLWDTAGQEDYERLRPLSYPNTDCFLLCYSVGSRSSFENIASKWHPEIQHHCPKIPVILIGTKTDLRLSQNDCITRKKGKKMMKKIGAVKYLECSALTNEGLDTIFTESVRAAIERPRKNCFGFPFIQCCK

SEQ ID NO: 176 - DNA, 579 bp, Anopheles gambiae
  Anopheles gambiae str. PEST
  CDS (1)..(579)
atgcaagcgatcaaatgtgtcgtcgtcggtgacggtgccgtcggtaagacgtgcctgctgatcagctacacaacgaacgcgttcccgggcgagtacatcccgaccgtgttcgacaactactccgcgaacgtgatggtcgacggcaaaccgatcaacctcgggctgtgggatacggccgggcaggaggattacgatcggctgcggcccctgtcctacccgcagacggacgtgtttctcatatgcttctcgctcgtcaatccggcctcgttcgagaacgtgcgggcgaaatggtacccggaggtgcgccaccactgtccgaacataccgatcatactggtcgggacgaagctcgatctgcgggatgacaagaacacggtggacaagctgcgggacaagaagctgtcgccgatcacgtacccgcaggggctggccatggccaaggagatcggtgcggtgaagtacctcgagtgttcggcgctgacgcagaagggcctcaagacggtgttcgacgaagcgatccgggcggtgctctgtccgatgattccgccgaagaagaaacccaagtgtaacatcctctaa

SEQ ID NO: 177 - protein, 192 aa, Anopheles gambiae
  Anopheles gambiae str. PEST
MQAIKCVVVGDGAVGKTCLLISYTTNAFPGEYIPTVFDNYSANVMVDGKPINLGLWDTAGQEDYDRLRPLSYPQTDVFLICFSLVNPASFENVRAKWYPEVRHHCPNIPIILVGTKLDLRDDKNTVDKLRDKKLSPITYPQGLAMAKEIGAVKYLECSALTQKGLKTVFDEAIRAVLCPMIPPKKKPKCNIL

SEQ ID NO: 178 - DNA, 603 bp, Magnaporthe grisea
  Magnaporthe grisea 70-15
  CDS (1)..(603)
atggcggccgcaaataatcagaacgtcattcgcaggaaactggtaattataggagacggtgcatgcggaaagacaagtttacttagcgtgttcactcttgggtattttccaacacattatattccgaccgtcttcgaaaactacgtgacagattgcagggtggatggcaagtcggtgcagctagcattatgggatacggcaggccaggaggactacgagcgattacggcccttggcatactcaaaagcgcacgtcatcctaatagggttttctgtcgacacgccggattcattggacaatgtgaagcacaagtggatcgaagaggctaccgaaaagtgccctggggtacccatcatccttgtcggcctcaagaaggacctgcgggaagaccccgtggccatcgaggagatgcgcaagaagagcatgcgctttgtcaccgagcacgacggtgagactgcggccaaggaagtcggtgcccgcaaatatctagagtgttcgagcttgtctggcgaaggagtcgacgacgtctttgaggcagccacgcgcgcagccctcttgacatttgaaaagggtgagggagccggatgctgtgtgatcctatag

SEQ ID NO: 179 - protein, 200 aa, Magnaporthe grisea
  Magnaporthe grisea 70-15
MAAANNQNVIRRKLVIIGDGACGKTSLLSVFTLGYFPTHYIPTVFENYVTDCRVDGKSVQLALWDTAGQEDYERLRPLAYSKAHVILIGFSVDTPDSLDNVKHKWIEEATEKCPGVPIILVGLKKDLREDPVAIEEMRKKSMRFVTEHDGETAAKEVGARKYLECSSLSGEGVDDVFEAATRAALLTFEKGEGAGCCVIL

SEQ ID NO: 180 - DNA, 633 bp, Magnaporthe grisea
  Magnaporthe grisea 70-15
  CDS (1)..(633)
atgcctttatcgctttgcggaggaagcaaaacggtccagcgcaagctggtattgcttggcgacggtgcttgtggaaagacatcactgttaaacgtcttcacgagaggatacttcccgaccgtctacgagccaacagtattcgagaactatgttcatgacatctttgtagataatgtccacatcgaactgtcactatgggatacagcaggacaagaggaattcgacaggttgaggagtctttcatatgacgatacggatttgatcatgctctgctattcggtcgacagcaaggacagtctcgaaaacgtcgaatcaaaatgggtcggcgagatagcagacaactgcccgggtgtcaagttggtgctggttgcgctcaagtgcgacttgcgccaggagcaggctgatgacgcggctgaaaacgggaacgcgacagatccttcgcagcagcgcgagaagaagcccatgatcacgtacgacacgggtctcgaagtggcacggcgcatcaatgcactgcggtatctcgaatgttcggccatgcgcaatcgcggcgtcaacgaggcctttactgaggcggcacgcgtggcacttagcgtgaagaaggaccgcgaggagagcaagtgcaccgtcatgtag

SEQ ID NO: 181 - protein, 210 aa, Magnaporthe grisea
  Magnaporthe grisea 70-15
MPLSLCGGSKTVQRKLVLLGDGACGKTSLLNVFTRGYFPTVYEPTVFENYVHDIFVDNVHIELSLWDTAGQEEFDRLRSLSYDDTDLIMLCYSVDSKDSLENVESKWVGEIADNCPGVKLVLVALKCDLRQEQADDAAENGNATDPSQQREKKPMITYDTGLEVARRINALRYLECSAMRNRGVNEAFTEAARVALSVKKDREESKCTVM

SEQ ID NO: 182 - DNA, 582 bp, Magnaporthe grisea
  Magnaporthe grisea 70-15
  CDS (1)..(582)
atggccgaaatccgccgcaagctggtcatcgtcggtgacggtgcctgcggtaagacatgtttgttgattgtgttctctaagggcaccttccccgaggtctacgtccccaccgtcttcgaaaactacgtcgctgatgtggaggtcgatggcaagcacgtcgagttggcactatgggatactgccggccaggaggattacgatcgtctgcgccccttgtcctaccccgactctcacgttatcctgatttgcttcgccatcgactctcccgactcccttgacaacgtccaagagaagtggatctccgaggtccttcacttctgctcgggcctgccaattatccttgttggttgcaagaaggatcttcggtatgaccagaagaccattgaggagcttcgcaagaccagccagaagcccgtctcacctgaggatggtgaggagattaagaagaagattggtgcctacaagtacctcgagtgctcggccaagaccaacgagggtgtccgtgaggtgttcgagcatgctacacgagctgccctcctgtctcgccacaagaccaagaagaagaagtgcctcatcctctaa

SEQ ID NO: 183 - protein, 193 aa, Magnaporthe grisea
  Magnaporthe grisea 70-15
MAEIRRKLVIVGDGACGKTCLLIVFSKGTFPEVYVPTVFENYVADVEVDGKHVELALWDTAGQEDYDRLRPLSYPDSHVILICFAIDSPDSLDNVQEKWISEVLHFCSGLPIILVGCKKDLRYDQKTIEELRKTSQKPVSPEDGEEIKKKIGAYKYLECSAKTNEGVREVFEHATRAALLSRHKTKKKKCLIL

SEQ ID NO: 184 - DNA, 627 bp, Gibberella zeae
  Gibberella zeae PH-1
  CDS (1)..(627)
atgcctgctctttgtggaggatccaagactgttcagcgaaagctggttctgctgggtgatggtgcttgcggaaagacatcattgctcaacgtctttactagaggctacttcccaacggtttacgaacctacggttttcgagaattacgttcacgacatctttgtggataatgtccacatcgaactttctctctgggatacagccggccaagaagaattcgaccgattacgatccctctcctacgatgacacagatctcatcatgctctgctactcagtcgacagcaaagactcgctcgaaaacgtagagtccaagtgggtaggcgaaatcgccgacaactgccccggcacgaaactcgtgctcgtagccctcaagtgcgacctccgcgagcagggcgaagacgacgaaaacgcagcagcgggcggcgaatcagaacaaccccgggagaagaagccaatgatcaactacgaccagggtctcgaggtggcgcgtcgcataggcgcccagcgatacctcgagtgctccgccatgaagaacaggggcgtcaacgaggcctttaccgaggctgcgcgcgttgctctcagcgtcaagaaggatcgcgaggagggcaagtgcatcgtcatgtga

SEQ ID NO: 185 - protein, 208 aa, Gibberella zeae
  Gibberella zeae PH-1
MPALCGGSKTVQRKLVLLGDGACGKTSLLNVFTRGYFPTVYEPTVFENYVHDIFVDNVHIELSLWDTAGQEEFDRLRSLSYDDTDLIMLCYSVDSKDSLENVESKWVGEIADNCPGTKLVLVALKCDLREQGEDDENAAAGGESEQPREKKPMINYDQGLEVARRIGAQRYLECSAMKNRGVNEAFTEAARVALSVKKDREEGKCIVM

SEQ ID NO: 186 - DNA, 594 bp, Gibberella zeae
  Gibberella zeae PH-1
  CDS (1)..(594)
atgagcgcaaatccgagcaacgttatccgcaggaagctggtcattatcggtgatggtgcctgcggcaagaccagtttgttgagcgtatttacgctaggttactttcctacaattcccacagtttttgagaactacgtgacggactgcagagtggacggcaagtctgtccagctcgctctttgggatactgctggccaggaagactacgagcgattacgaccccttgcatattcgaaagcccatgtcattttgataggcttttctgtcgacaccccagattctctcgacaacgttaagcacaagtggattgaagaagcccagcgactttgcaccggtgttcctatcattctcgttggcctgaagaaggatcttcgagaagaccccgttgcgattgaggaaatgcgcaagaagtcgatgcgatttgtgtcagagcacgatggagagtctatcgcacgagaaattggcgcaaaacgatatctggaatgctccagtttgagcggcgagggtgtcgacgatgtcttcgaggcggctactcgtgctgctctgctgactttcgaaaagggtgagggcggtggctgctgtgtcgtgctgtaa

SEQ ID NO: 187 - protein, 197 aa, Gibberella zeae
  Gibberella zeae PH-1
MSANPSNVIRRKLVIIGDGACGKTSLLSVFTLGYFPTIPTVFENYVTDCRVDGKSVQLALWDTAGQEDYERLRPLAYSKAHVILIGFSVDTPDSLDNVKHKWIEEAQRLCTGVPIILVGLKKDLREDPVAIEEMRKKSMRFVSEHDGESIAREIGAKRYLECSSLSGEGVDDVFEAATRAALLTFEKGEGGGCCVVL

SEQ ID NO: 188 - DNA, 588 bp, Gibberella zeae
  Gibberella zeae PH-1
  CDS (1)..(588)
atggctgagatccgccgaaagctcgtcattgtcggcgatggtgcttgtggtaaaacctgtttgttgattgttttctccaagggcactttccccgaggtttacgtccccaccgtcttcgagaactatgttgccgatgtcgaggttgacggcaagcacgtcgagctcgccctatgggatactgctggtcaggaggattacgaccgtcttcgacctctttcttaccccgactcccacgttatcttgatctgcttcgccgttgactctcccgactccctcgacaacgtccaggagaagtggatctctgaggttctgcacttctgccagggtctccctatcatccttgttggctgcaagaaggatttgcgatacgaccagaagatcattgaggagctccgaaagaccagccagaagcccgtctcccctgaggagggtgaggagatccgcaagaagatctctgcttacaagtaccttgagtgctcagccaagaccaacgaaggtgtccgcgaagtgttcgagcacgctactcgcgctgctctgctgtcgcgcagcacccgaagcaagtctcacaagaagtgtcttgttctgtaa

SEQ ID NO: 189 - protein, 195 aa, Gibberella zeae
  Gibberella zeae PH-1
MAEIRRKLVIVGDGACGKTCLLIVFSKGTFPEVYVPTVFENYVADVEVDGKHVELALWDTAGQEDYDRLRPLSYPDSHVILICFAVDSPDSLDNVQEKWISEVLHFCQGLPIILVGCKKDLRYDQKIIEELRKTSQKPVSPEEGEEIRKKISAYKYLECSAKTNEGVREVFEHATRAALLSRSTRSKSHKKCLVL

SEQ ID NO: 190 - DNA, 600 bp, Gibberella zeae
  Gibberella zeae PH-1
  CDS (1)..(600)
atggcccagcccggcgtgcaatcattgaagtgtgtggtgaccggtgatggtgctgttggaaagacctgtctactcatttcctacaccacaaatgcattccccggcgaatacatccctacagtctttgacaactactctgctagtgttatggtagatggcaagcctattagccttggcctctgggatactgctggtcaggaggattacgacagactgcgacccctctcatacccccagaccgatgtctttctcatctgcttctccatcgtcagccctccgtcattcgacaacgtaaaggcaaagtggtaccccgagatcgaccatcatgcgccaaacatccccatcattctcgtcggaaccaagctcgatcttcgagaggacgcatccaccctcgagtctcttcgacagaagcgcatggagcctgtgtcatacgagcaggcgctgacttgcgccaaggagatcaaggcctacaagtacctcgagtgttctgctttgacccaaagaaacctcaagagcgtctttgacgaggctatccgggccgttctcaacccccgacccacaccttcaaagcaaaagaagaacaaatgctccatcctgtag

SEQ ID NO: 191 - protein, 199 aa, Gibberella zeae
  Gibberella zeae PH-1
MAQPGVQSLKCVVTGDGAVGKTCLLISYTTNAFPGEYIPTVFDNYSASVMVDGKPISLGLWDTAGQEDYDRLRPLSYPQTDVFLICFSIVSPPSFDNVKAKWYPEIDHHAPNIPIILVGTKLDLREDASTLESLRQKRMEPVSYEQALTCAKEIKAYKYLECSALTQRNLKSVFDEAIRAVLNPRPTPSKQKKNKCSIL

SEQ ID NO: 192 - DNA, 642 bp, Apis mellifera
  CDS (1)..(642)
atgggatgcaatacgggccgatgcctcggtccagacgatacggggtaccctggatcagaattcatggcagccattagaaagaaattggttattgtgggtgatggtgcttgtggtaaaacatgcttacttatagtcttcagcaaagaccaatttccagaagtttatgtacctacagtgtttgaaaattatgttgcagatattgaagttgatgggaaacaagtggaactggctctttgggacacagctggacaagaagattatgataggttgcgtccactatcatatcctgacacagatgtaatcttaatgtgtttctctattgatagtccagattccctggaaaacattcctgagaaatggacaccagaggtgaagcacttttgcccaaatgtgcccattatccttgttggaaacaaaaaagacttacgcaatgatcctaatacaatcaaagaacttagtaagatgaaacaagaaccagttaagccagaagaaggaagagctatggctgaaaaaatcaatgcctttgcttatcttgaatgttctgctaaaagtaaggaaggtattagggaagtatttgaaacagccactcgggcagcattacaagtaaaaaagaagaagaagggaagatgttggctcctataa

SEQ ID NO: 193 - protein, 213 aa, Apis mellifera
MGCNTGRCLGPDDTGYPGSEFMAAIRKKLVIVGDGACGKTCLLIVFSKDQFPEVYVPTVFENYVADIEVDGKQVELALWDTAGQEDYDRLRPLSYPDTDVILMCFSIDSPDSLENIPEKWTPEVKHFCPNVPIILVGNKKDLRNDPNTIKELSKMKQEPVKPEEGRAMAEKINAFAYLECSAKSKEGIREVFETATRAALQVKKKKKGRCWLL

SEQ ID NO: 194 - DNA, 576 bp, Apis mellifera
  CDS (1)..(576)
atgcagacgataaaatgcgttgtggttggagatggagctgtgggtaaaacttgtcttttgatttcatatacaaccaataagtttccatccgaatatgtacctacagtgtttgacaattacgcagtaacagtaatgatcggtggagatccatatacattgggattattcgatactgctggtcaggaggattacgacagacttagaccattaagttatccccaaacggatgtatttcttgtttgtttctcagttgtttcaccatcatcttttgaaaatgttaaagaaaagtgggtacccgaaataacacatcattgtccaaggacaccgtttttattggttggtactcaaatcgatttgagagatgatgttgctactatcgaaaagttggcaaagaataaacaaaagccaatatccgcggagcaaggggaaaagcttgccaaagaattaaaagcagtgaaatacgtagaatgtagtgctcttacgcagaaaggtttgaaaaatgtgtttgatgaagctattttagccgccttagaacctccagaaccagtaaagaagagaaagtgtacgcttttgtaa

SEQ ID NO: 195 - protein, 191 aa, Apis mellifera
MQTIKCVVVGDGAVGKTCLLISYTTNKFPSEYVPTVFDNYAVTVMIGGDPYTLGLFDTAGQEDYDRLRPLSYPQTDVFLVCFSVVSPSSFENVKEKWVPEITHHCPRTPFLLVGTQIDLRDDVATIEKLAKNKQKPISAEQGEKLAKELKAVKYVECSALTQKGLKNVFDEAILAALEPPEPVKKRKCTLL

SEQ ID NO: 196 - DNA, 684 bp, Candida glabrata
  Candida glabrata CBS 138
  CDS (1)..(684)
atggcatttctgtgtggatcctcttcatctcaatcctcaggttctaagaaacctgtcgagagaaagattgttattctaggtgatggtgcgtgtggtaaaacctcgctgctgaacgtgttcaccaggggctatttcccagaagtctacgagcccactgtctttgagaactatattcatgacatctttgtcgataacagacacattacgttgtcgctgtgggataccgcgggacaagaagaatttgacaggttacgatcattatcatactctgacacgcacaccataatgctgtgtttcagtatagactctagggactccttggagaacgtcaagaataaatgggttggtgaaataacggaccattgtgaaggtgtgaacctggtgctagttgctctgaaatgtgacttgagaaataacgagaacaacgtaataaccccaaacaacatccaaaataaccgtaataacaacaataacaacaacctgatcacttatgaagaaggtctcgctatggccaagcagattggtgctctccgttacttggagtgtagcgcaaagttgaacaaaggtgtcaacgaagcattcaccgaagccgcaagagtggccttgactgccaaaaatgccacagataatatcaactccaatagttcatctaatgaaaaggatagcttctgtactatctgttag

SEQ ID NO: 197 - protein, 227 aa, Candida glabrata
  Candida glabrata CBS 138
MAFLCGSSSSQSSGSKKPVERKIVILGDGACGKTSLLNVFTRGYFPEVYEPTVFENYIHDIFVDNRHITLSLWDTAGQEEFDRLRSLSYSDTHTIMLCFSIDSRDSLENVKNKWVGEITDHCEGVNLVLVALKCDLRNNENNVITPNNIQNNRNNNNNNNLITYEEGLAMAKQIGALRYLECSAKLNKGVNEAFTEAARVALTAKNATDNINSNSSSNEKDSFCTIC

SEQ ID NO: 198 - DNA, 633 bp, Candida glabrata
  Candida glabrata CBS 138
  CDS (1)..(633)
atgtcgcaacaagtcggtgctagtattagaagaaagctagttattgtcggtgatggtgcctgtggtaagacctgtcttttgattgtgttttccaagggtcaattcccagaagtttacgttccaactgtttttgagaactacgttgctgatgttgaggtggatggcagacgtgttgagttggctctgtgggataccgctggccaagaagattacgatagactaagaccattgtcgtacccagactccaatgttgtcttgatctgtttctctatcgatctgccagattccctagagaacgtccaggagaagtggattgccgaggtgctacatttctgtcaaggggttccaatcatccttgtaggttgtaaagttgatctaagaaacgacccacaaactttggaacaattgagagctgaaggcctacaaccagtcgctactgccgatggtcaaaacgttgccgaccaaattggtgccactggctactacgaatgttccgccaagaccggctacggtgtgcgtgaagtctttgaagccgccactagagcctctttgatgggtaagcaaaagaacaccggtaagaagaacaagaagaactctggtgaaaagaagaagagaaagtgtgttctattgtaa

SEQ ID NO: 199 - protein, 210 aa, Candida glabrata
  Candida glabrata CBS 138
MSQQVGASIRRKLVIVGDGACGKTCLLIVFSKGQFPEVYVPTVFENYVADVEVDGRRVELALWDTAGQEDYDRLRPLSYPDSNVVLICFSIDLPDSLENVQEKWIAEVLHFCQGVPIILVGCKVDLRNDPQTLEQLRAEGLQPVATADGQNVADQIGATGYYECSAKTGYGVREVFEAATRASLMGKQKNTGKKNKKNSGEKKKRKCVLL

SEQ ID NO: 200 - DNA, 567 bp, Candida glabrata
  Candida glabrata CBS 138
  CDS (1)..(567)
atgtccgagaaagctatacggagaaaattggtgattatcggtgatggtgcgtgcggtaaaacatcgttactttatgtgtttacgctggggaaattccctgaacaataccatcctacagtgtttgagaactatgtaacagattgtcgcgttgatgggataaaagtatctctggcattgtgggatacagcaggacaagaagaatacgaaagattaagaccattttcttattcaggggcagatgtaatactgattgctttttctgtggacaatgttgaatctctacataatgccaggacaaaatgggccgaagaagcgttcaggtactgtccagatgcacctgtgatacttgtagggctaaaggaagatttgaggaaatcaaaacaagaaggcatagttttcgtaaatagagaagatgcagaacaagtagcgaaggccattggggctaaaaagtatttggaatgcagtgcgttgactggtgaaggtgtcgatgatgtttttgagttggccacaagatcaagcttgctaatgcacaaagaaccggaccatttttgttgttcgatatcttag

SEQ ID NO: 201 - protein, 188 aa, Candida glabrata
  Candida glabrata CBS 138
MSEKAIRRKLVIIGDGACGKTSLLYVFTLGKFPEQYHPTVFENYVTDCRVDGIKVSLALWDTAGQEEYERLRPFSYSGADVILIAFSVDNVESLHNARTKWAEEAFRYCPDAPVILVGLKEDLRKSKQEGIVFVNREDAEQVAKAIGAKKYLECSALTGEGVDDVFELATRSSLLMHKEPDHFCCSIS

SEQ ID NO: 202 - DNA, 657 bp, Kluyveromyces lactis
  Kluyveromyces lactis NRRL Y-1140
  CDS (1)..(657)
atggcattaatagttgacaactttcgtagaaccctaggtgatattcctcattattcccaatgtggtgttaagggtagaagcgcacagtatcatttgaaaatagtagtagttggtgacggtgctgtggggaagacttcgttacttatttcctatacacaaggtaaatttcctgaagattatgtacccacgatatttgaaaactacgtgactaatttagagggaccaaatggtaagatagttgaattggcattgtgggacacagcaggacaagaagagtacagtcgacttagaccactgtcgtacaccgacgttgatgtattgatgatatgctatgcgattaacagtaaagtatccttttacaacattgaagaaatgtggttacctgaggtgaaacatttctgtcctgacgttccaataatgatcgtaggtttgaagagtgatctgtacgctgaagataacatttcagactttgtcgatgcatttaaagctgaagaaacagcgaaaagaatcggagcattcgtacatctgcaatgttcctcaaaatctcaacaaaaggtacgtgaagtcttcgatacagctatcactgctgccttgtatgacgaattgaaaccaaagaagaagaaactaaattcacgtcggaaatgtgtgattatttag

SEQ ID NO: 203 - protein, 218 aa, Kluyveromyces lactis
  Kluyveromyces lactis NRRL Y-1140
MALIVDNFRRTLGDIPHYSQCGVKGRSAQYHLKIVVVGDGAVGKTSLLISYTQGKFPEDYVPTIFENYVTNLEGPNGKIVELALWDTAGQEEYSRLRPLSYTDVDVLMICYAINSKVSFYNIEEMWLPEVKHFCPDVPIMIVGLKSDLYAEDNISDFVDAFKAEETAKRIGAFVHLQCSSKSQQKVREVFDTAITAALYDELKPKKKKLNSRRKCVII

SEQ ID NO: 204 - DNA, 564 bp, Kluyveromyces lactis
  Kluyveromyces lactis NRRL Y-1140
  CDS (1)..(564)
atgtctaccaatccagttaaaaggaaactagttattattggtgacggagcatgtgggaaaacatctttgttatatgttttcactttgggacagtttccagaagaatatcatccaactgtcttcgagaattatgtaaccgactgtcgagtggacggtatcaaagttcaactaacactatgggacacagctggccaagaggaatatgaaagactaaggcccttctcgtattcaaaggccgatataattctcattggttttgcaatcgacgacccggaatcattggtgaatgcaagaaataaatggtcagaagaagttctcagatattgccctgaagctccagtagtactagttgggttgaagaaagacttaagatcaccggataatgaacatcagatggtaacacgggagcaagcggagcaagttgccagggccattggtgctaaaaaatatatggaatgcagtgcattgacaggagaaaacgttgatgatgttttcgaagtagccacaaggacaagtctcttggtaaataaacaaccaggtcacgggtgctgcgtaatatgttga

SEQ ID NO: 205 - protein, 187 aa, Kluyveromyces lactis
  Kluyveromyces lactis NRRL Y-1140
MSTNPVKRKLVIIGDGACGKTSLLYVFTLGQFPEEYHPTVFENYVTDCRVDGIKVQLTLWDTAGQEEYERLRPFSYSKADIILIGFAIDDPESLVNARNKWSEEVLRYCPEAPVVLVGLKKDLRSPDNEHQMVTREQAEQVARAIGAKKYMECSALTGENVDDVFEVATRTSLLVNKQPGHGCCVIC

SEQ ID NO: 206 - DNA, 672 bp, Kluyveromyces lactis
  Kluyveromyces lactis NRRL Y-1140
  CDS (1)..(672)
atgcctctctgtggtggttcttcaagcaagcagccaattgagcgtaaaatagtcatattaggagatggtgcttgtggtaagacttctcttttaaatgttttcaccaggggatatttccctaaggtgtacgaacctaccatctttgagaattacattcacgatatatttgtggataatcagcacatatctttaagcttgtgggatacggcaggacaggaagaattcgacaggttgcgatcgttatcatacagtgacacacatactattatgttgtgtttttcggtagattcaagggactcgctagagaacgttcaaaataaatgggttggcgaaatcgcagatcattgtgaaggtgtgaaattagtacttgtagcgttaaaatgtgatttaagaaatttggaagagttcgggaacgaatctgctgccattaccccaggctctattcagaacaggaatagtaacgctaaggataatggattgattagttacgaagaaggtttggatatggcgaagaaaatcggtgcattgcgctacttggaatgcagcgccaaaatgaatagaggtgtcaacgaggcattcaccgaagctgctcgttgtgcattgactgcaactccaaagggggcgaatgataccatccctcaggataaaggaagcagttgtattattatgtga

SEQ ID NO: 207 - protein, 223 aa, Kluyveromyces lactis
  Kluyveromyces lactis NRRL Y-1140
MPLCGGSSSKQPIERKIVILGDGACGKTSLLNVFTRGYFPKVYEPTIFENYIHDIFVDNQHISLSLWDTAGQEEFDRLRSLSYSDTHTIMLCFSVDSRDSLENVQNKWVGEIADHCEGVKLVLVALKCDLRNLEEFGNESAAITPGSIQNRNSNAKDNGLISYEEGLDMAKKIGALRYLECSAKMNRGVNEAFTEAARCALTATPKGANDTIPQDKGSSCIIM

SEQ ID NO: 208 - DNA, 597 bp, Debaryomyces hansenii
  Debaryomyces hansenii CBS767
  CDS (1)..(597): transl_table=12
atggttcctcctccagctgaaatccgtagaaaattagttatcgttggtgatggtgcttgtggtaaaacttgtttgttgattgtgttttccaaaggtacattcccagaagtttacgtcccaactgttttcgaaaactacgtggctgacgtcgaagttgatggcagaaaggttgaattggccttgtgggatactgccggtcaagaagattacgatagattgagacctttgtcctacccagactccaatgttattttaatatgtttctccatcgactcgcctgactcgttggataacgtattagaaaagtggatctcggaagtgttacatttctgtcaaggtgttccaatcatcttggttggttgtaagtctgatttaagaaacgaccaaaacactatccatcaattaagtcaacaacaacaacaacctgtctctacctccgaaggtcaagcggtcgcccaaaagattggtactagttactatttggaatgttccgccagaactggagaaggtgtcagagaagtgttcgaagctgctaccagagcctcgttgaagactaaggaaaagaaggaaaagaagaagaagtgtgttgtgttataa

SEQ ID NO: 209 - protein, 198 aa, Debaryomyces hansenii
  Debaryomyces hansenii CBS767
MVPPPAEIRRKLVIVGDGACGKTCLLIVFSKGTFPEVYVPTVFENYVADVEVDGRKVELALWDTAGQEDYDRLRPLSYPDSNVILICFSIDSPDSLDNVLEKWISEVLHFCQGVPIILVGCKSDLRNDQNTIHQLSQQQQQPVSTSEGQAVAQKIGTSYYLECSARTGEGVREVFEAATRASLKTKEKKEKKKKCVVL

SEQ ID NO: 210 - DNA, 564 bp, Debaryomyces hansenii
  Debaryomyces hansenii CBS767
  CDS (1)..(564): transl_table=12
atgccagataattcattgaaaagaaaaatagtcatagtgggtgatggagcatgtgggaaaacttcgttgttatttgtattcacattaggagaatttcctactgaataccatcccactgtatttgagaattatgtcactgattgcagagtcgatggaaaagcagttcaattggccttatgggatacggctggacaagaggaatacgaaagattgcgtccattgagctatgccaattcgcatgtaatcttgatcggctttgctatagatgtacctgattcattggataatgctcgaacaaaatgggtcgaggaagtcaccaaatattgtcccaatacgccatatttattaattggcttaaagaaggatcttagagtggaatcttccaatagaagaaagtatgtccaatttcatcagggcgagatagcagccaaagagatgcatgctaaaaaatacttagagagttcagcattatacggcgagggtgtagacgatatattcgaatatgcgacaagaacaagcttattggttcaaaaggctaatcaaacatgctgtactattttataa

SEQ ID NO: 211 - protein, 187 aa, Debaryomyces hansenii
  Debaryomyces hansenii CBS767
MPDNSLKRKIVIVGDGACGKTSLLFVFTLGEFPTEYHPTVFENYVTDCRVDGKAVQLALWDTAGQEEYERLRPLSYANSHVILIGFAIDVPDSLDNARTKWVEEVTKYCPNTPYLLIGLKKDLRVESSNRRKYVQFHQGEIAAKEMHAKKYLESSALYGEGVDDIFEYATRTSLLVQKANQTCCTIL

SEQ ID NO: 212 - DNA, 615 bp, Yarrowia lipolytica
  Yarrowia lipolytica CLIB122
  CDS (1)..(615)
atgccccaaccagcggatctgcgaagaaaactcgtcattgtcggcgacggagcctgcggcaagacctgtctgctgattgtcttcgcgaagggcaccttcccggaggtgtacgtgcccaccgtgtttgagaactacgtggccgacgtggagattgacggccgacgagtggagctggccctgtgggataccgccggccaggaggattacgaccgactgcgacccctgtcctaccccgacgccaacgtcatcatcatctgcttcgccatcgacagccccgactcgctcgacaacgtgcaggagaagtggatctccgaggtgctgcacttttgccagggcgtgcctattctgctggtcggttgcaaggtcgacctgcgaaacgaccccaagaccatcgaggagctgagaagaacgtcccagcgacccgtcacgaccgaggagggaaatgccgtggcccagaagattggcgccggcaagtacctggagtgctctgcccgaacccacgacggagtgagagaggtcttcgagcatgccacccgagctgccctgactgcccacggccagaagggctccaagagctccagcagagagggcaagaaaaagtgtttgattttgtaa

SEQ ID NO: 213 - protein, 204 aa, Yarrowia lipolytica
  Yarrowia lipolytica CLIB122
MPQPADLRRKLVIVGDGACGKTCLLIVFAKGTFPEVYVPTVFENYVADVEIDGRRVELALWDTAGQEDYDRLRPLSYPDANVIIICFAIDSPDSLDNVQEKWISEVLHFCQGVPILLVGCKVDLRNDPKTIEELRRTSQRPVTTEEGNAVAQKIGAGKYLECSARTHDGVREVFEHATRAALTAHGQKGSKSSSREGKKKCLIL

SEQ ID NO: 214 - DNA, 612 bp, Yarrowia lipolytica
  Yarrowia lipolytica CLIB122
  CDS (1)..(612)
atgccagcacagcccgccgatttgcgacgaaagctcgtcattgtgggagacggagcctgcggaaaaacctgtctgctcattgtctttgccaagggcaccttccccgaggtctacgtgcccactgtgttcgacaactacgtgaccgacgtggagattgacggccgacgagtggagctggccctgtgggataccgccggccaggaagactacgaccgactgcgacccctgtcgtaccccgattccaacgtgatcatcatctgctttgccatcgactcgcccgactcgctggacaacgtgcaggagaagtggatttccgaggtgctgcacttttgccagggcgtgcccattctgctggtcggttgcaaggtggacctgcgaaacgaccccaagaccatcgaggagctcagaagaacgtcccagcgaccggtcaccaccgaggagggaaacgccgtggcccagaagattggcgcactcaagtacctcgagtgctctgcccgaacccacgacggagtgcgggagatctttgagcacgctacccgagccgctctcattggccccaagggacgagagcccacttcaggcaagaagaagaagaagtgcgtgatcctctaa

SEQ ID NO: 215 - protein, 203 aa, Yarrowia lipolytica
  Yarrowia lipolytica CLIB122
MPAQPADLRRKLVIVGDGACGKTCLLIVFAKGTFPEVYVPTVFDNYVTDVEIDGRRVELALWDTAGQEDYDRLRPLSYPDSNVIIICFAIDSPDSLDNVQEKWISEVLHFCQGVPILLVGCKVDLRNDPKTIEELRRTSQRPVTTEEGNAVAQKIGALKYLECSARTHDGVREIFEHATRAALIGPKGREPTSGKKKKKCVIL

SEQ ID NO: 216 - DNA, 579 bp, Yarrowia lipolytica
  Yarrowia lipolytica CLIB122
  CDS (1)..(579)
atgcagagtataaaatgtgtcgtcactggcgacggtgccgtcggtaaaacttgcatgctaatctcatacaccacaaacgccttcccaggagagtacatccccaccgtcttcgacaactactctgccaatgtcatggtggataacaaaccgataaacctcggactttgggataccgcgggccaggaagattacgaccggctgcggccactgtcatacccccagaccggcgtgtttcttatctgcttctcgctcgtgtcgcccccgtcgttcgagaacgtcaaagctaagtggcaccccgaaatctcgcaccacgcccccaatacgcccatcatcctcgtcggcaccaagctcgacctgcgtaacgacagtgagactctggcgcggctcgctgaaaagcgacaagcccccatcacatatgcagaaggcgccaagtgtgctcgggacattggcgccgtcaaatactttgagtgctcggcattgacccaaaagggactcaaaacagtgtttgacgaggccattcacgcggtgctgtcgcctccccagcccaagaaaaagaagaagaactgtgtgattctctaa

SEQ ID NO: 217 - protein, 192 aa, Yarrowia lipolytica
  Yarrowia lipolytica CLIB122
MQSIKCVVTGDGAVGKTCMLISYTTNAFPGEYIPTVFDNYSANVMVDNKPINLGLWDTAGQEDYDRLRPLSYPQTGVFLICFSLVSPPSFENVKAKWHPEISHHAPNTPIILVGTKLDLRNDSETLARLAEKRQAPITYAEGAKCARDIGAVKYFECSALTQKGLKTVFDEAIHAVLSPPQPKKKKKNCVIL

SEQ ID NO: 218 - DNA, 615 bp, Yarrowia lipolytica
  Yarrowia lipolytica CLIB122
  CDS (1)..(615)
atggccatctgcggcggagcccccaaggctatttcaagaaaaattgtcattctaggtgatggtgcttccggtaagacctctctgctgaacgttttcactcggggatacttcccccacgtgtacgagcccaccgtgtttgaaaactacgtgcatgacattttcatcgacggccagcccgtacagctgtctctgtgggacactgctggtcaggaggagtttgaccgactacgatctctgtcgtactcagatacacacaccatcatgctgtgtttttccgtcgactcgcgcgactcgctggaaaacgtgcagaccaagtgggtgggtgagattgccgaccactgtgagggcgtcaagttggtgctggtggctctcaagtgcgatctgcgaaacaatgaggagggcggcgagggcgccaagaagacgtacgtcacctacgagcagggcctggaggtggccaagaagattggcgctcttcgatacctcgagtgctcggccaagatgaaccgaggagtcaacgaggcttttaccgaggctgctcgatgtgctctgggagctaagcccaagggcgctgcagccgatgacaaggaggagtcttccaagtgcgtcatcatgtag

SEQ ID NO: 219 - protein, 204 aa, Yarrowia lipolytica
  Yarrowia lipolytica CLIB122
MAICGGAPKAISRKIVILGDGASGKTSLLNVFTRGYFPHVYEPTVFENYVHDIFIDGQPVQLSLWDTAGQEEFDRLRSLSYSDTHTIMLCFSVDSRDSLENVQTKWVGEIADHCEGVKLVLVALKCDLRNNEEGGEGAKKTYVTYEQGLEVAKKIGALRYLECSAKMNRGVNEAFTEAARCALGAKPKGAAADDKEESSKCVIM

SEQ ID NO: 220 - DNA, 573 bp, Anopheles gambiae
  Anopheles gambiae str. PEST
  CDS (1)..(573)
atgtcatccggaagacctatcaaatgtgtggtggtcggcgacggcacggtggggaagacgtgcatgttgatcagctacacgaccgacagctttcccggcgaatacgtacccacggtcttcgacaactactccgccccgatggtggtggacggtgtgcaagtgtcgctcgggctgtgggatacggccgggcaggaagactacgatcggctaaggcccctgtcctacccacagacggacgtgttcctcatatgctacagtgtggccagcccgtcgtcgttcgaaaacgttacctccaaatggtatcccgagatcaagcaccactgcccggatgcgcccatcattttagtcggaaccaaaatcgatctgcgcgaggatcgggaaacgataagcttgctggcggaccagggcctttccgcgctgaagcgcgaacagggccaaaagctagcgaacaagatacgggcggtaaagtatatggaatgttcggcactaacccagcggggcctaaagcaggtgtttgacgaagcgctttgcgccacggaagagaaagagcgaatgccggtagaagaggagtag

SEQ ID NO: 221 - protein, 190 aa, Anopheles gambiae
  Anopheles gambiae str. PEST
MSSGRPIKCVVVGDGTVGKTCMLISYTTDSFPGEYVPTVFDNYSAPMVVDGVQVSLGLWDTAGQEDYDRLRPLSYPQTDVFLICYSVASPSSFENVTSKWYPEIKHHCPDAPIILVGTKIDLREDRETISLLADQGLSALKREQGQKLANKIRAVKYMECSALTQRGLKQVFDEALCATEEKERMPVEEE

SEQ ID NO: 222 - DNA, 579 bp, Apis mellifera
  CDS (1)..(579)
atggcagccattagaaagaaattggttattgtgggtgatggtgcttgtggtaaaacatgcttacttatagtcttcagcaaagaccaatttccagaagtttatgtacctacagtgtttgaaaattatgttgcagatattgaagttgatgggaaacaagtggaactggctctttgggacacagctggacaagaagattatgataggttgcgtccactatcatatcctgacacagatgtaatcttaatgtgtttctctattgatagtccagattccctggaaaacattcctgagaaatggacaccagaggtgaagcacttttgcccaaatgtgcccattatccttgttggaaacaaaaaagacttacgcaatgatcctaatacaatcaaagaacttagtaagatgaaacaagaaccagttaagccagaagaaggaagagctatggctgaaaaaatcaatgcctttgcttatcttgaatgttctgctaaaagtaaggaaggtattagggaagtatttgaaacagccactcgggcagcattacaagtaaaaaagaagaagaagggaagatgttggctcctataa

SEQ ID NO: 223 - protein, 192 aa, Apis mellifera
MAAIRKKLVIVGDGACGKTCLLIVFSKDQFPEVYVPTVFENYVADIEVDGKQVELALWDTAGQEDYDRLRPLSYPDTDVILMCFSIDSPDSLENIPEKWTPEVKHFCPNVPIILVGNKKDLRNDPNTIKELSKMKQEPVKPEEGRAMAEKINAFAYLECSAKSKEGIREVFETATRAALQVKKKKKGRCWLL

SEQ ID NO: 224 - DNA, 579 bp, Apis mellifera
  CDS (1)..(579)
atgcaagctattaaatgtgttgtcgtaggagacggagcagtaggtaaaacatgtctccttataagctatactaccaatgcctttcctggagaatatattccaactgtatttgataattattctgcaaatgtcatggtggatggtaaaccaataaatcttggtttatgggatacagcaggtcaagaagattatgacagattaagaccattgtcttatcctcaaacagatgtttttttgatctgcttttctctcgttaacccagccagttttgaaaatgttcgtgcaaaatggtatccagaagtacgtcatcattgtccagctactccaattattttagtaggaactaaattagatttacgcgaagataaagaaacaattgagcgattaaaagataagaaacttgcaccaataacatatcctcagggtttatccatggcaaaagaaattggtgctgtaaaatatttagaatgttcggctcttactcaaaaaggattaaaaacagtatttgatgaagcaattcgcgcagtattgtgtcctgttcttcaagtgaaaccaaaacgcagatgtttccttctataa

SEQ ID NO: 225 - protein, 192 aa, Apis mellifera
MQAIKCVVVGDGAVGKTCLLISYTTNAFPGEYIPTVFDNYSANVMVDGKPINLGLWDTAGQEDYDRLRPLSYPQTDVFLICFSLVNPASFENVRAKWYPEVRHHCPATPIILVGTKLDLREDKETIERLKDKKLAPITYPQGLSMAKEIGAVKYLECSALTQKGLKTVFDEAIRAVLCPVLQVKPKRRCFLL

SEQ ID NO: 226 - DNA, 588 bp, Apis mellifera
  CDS (1)..(588)
atgagttcaggtagaccaattaaatgtgtggtagtaggagatggaacagtaggaaaaacatgtatgttaatatcatataccactgatagttttccaggagaatatgttcctacagtgtttgataattactcagcacctatggttgtggatggaatacctgttagtcttggactttgggatacagcaggtcaagaagattatgacaggcttcgtccactttcatatccacagactgatgtttttttaatttgtttctcagtaacaagtccttcatcttttgaaaatgttaccagcaaatggtatccagagattaaacatcactgcccagatgctccaatgatacttgttggaactaaaatagacttacgagatgatcgtgaaacacttactgccttagctgaacaaggtcttagtgctataaaacgtgaacaaggacaaaaactggcaaataagattcgtgctgtgaaatatatggaatgttctgcacttacacaacgtggtctaaaacaagtgtttgatgaagcagttcgtgctgttttaagacctgaacctcaaaaacgcagacagagaagatgcattatgttataa

SEQ ID NO: 227 - protein, 195 aa, Apis mellifera
MSSGRPIKCVVVGDGTVGKTCMLISYTTDSFPGEYVPTVFDNYSAPMVVDGIPVSLGLWDTAGQEDYDRLRPLSYPQTDVFLICFSVTSPSSFENVTSKWYPEIKHHCPDAPMILVGTKIDLRDDRETLTALAEQGLSAIKREQGQKLANKIRAVKYMECSALTQRGLKQVFDEAVRAVLRPEPQKRRQRRCIML

SEQ ID NO: 228 - DNA, 600 bp, Aspergillus nidulans
  Aspergillus nidulans FGSC A4
  CDS (1)..(600)
atggcgactggacctgctactcagtccctgaagtgtgtcgtgacgggcgacggtgctgtcggcaagacatgtcttctcatttcttatacgaccaatgccttccccggcgaatatattcccaccgtattcgacaattatactgctagtgtcatggtcgatggtagaccgattagcttaggactttgggatactgctggacaggaagattacgaccgacttcgcccattgtcctaccctcaaaccgatgtatttctcatttgcttctccatcgtcagccctccgtctttcgacaacgtcaagtctaagtggttcccggaaatcgaacaccacgcgcccaacgttccaatcatcctagttggcaccaagctcgatttgcgagacgaccccgcccagctcgaaagcctccgcatgaggaagcaggagcccgttacttatgagcaggctctggccgtggcgaaggagatccgagcacacaaatacctcgagtgctctgccctaacgcaacgcaaccttaagagcgtgttcgacgaagccattcgtgctgttctgaacccgcgacctgcgacgaaacagaggaacaagaagtgtacgattctgtga

SEQ ID NO: 229 - protein, 199 aa, Aspergillus nidulans
  Aspergillus nidulans FGSC A4
MATGPATQSLKCVVTGDGAVGKTCLLISYTTNAFPGEYIPTVFDNYTASVMVDGRPISLGLWDTAGQEDYDRLRPLSYPQTDVFLICFSIVSPPSFDNVKSKWFPEIEHHAPNVPIILVGTKLDLRDDPAQLESLRMRKQEPVTYEQALAVAKEIRAHKYLECSALTQRNLKSVFDEAIRAVLNPRPATKQRNKKCTIL

SEQ ID NO: 230 - DNA, 576 bp, Aspergillus nidulans
  Aspergillus nidulans FGSC A4
  CDS (1)..(576)
atggatttctgtgggcgtcaaaaagtcgttcggcgcaagatggtgctcttaggagatggcgcttgcggtaaaacctcggccctgaacgtgttcacaagaggtgaaccgactgtctttgagaactacgtccatgatatcttcgtcgataacgtgcatatggaactgtcgttatgggacacggctggccaagaagaatttgatcgattacgtgcactctcatatgaggatacgcatgtcataatgctgtgctttagtgtcgacagccctgactcgttcgaaaacgtggccagtaaatggatcgaagagatctcggagaatgtgcctggagtgaaactggtcctaacagcgcttaagtgcgacttgcggaaggacgaatatatgaatgacaacccgaatgttatcacatacgagcaaggactggcaaaggcgaaggaaattggggctgtgaagtacctcgagtgctctgcggtccaaaaccgcggcattagggaagccttctacgaagccgccaaagttgcccttgaggtgaaggctcaaaacaccggctcgtcgcaaagccgctgcgtcattcagtga

SEQ ID NO: 231 - protein, 191 aa, Aspergillus nidulans
  Aspergillus nidulans FGSC A4
MDFCGRQKVVRRKMVLLGDGACGKTSALNVFTRGEPTVFENYVHDIFVDNVHMELSLWDTAGQEEFDRLRALSYEDTHVIMLCFSVDSPDSFENVASKWIEEISENVPGVKLVLTALKCDLRKDEYMNDNPNVITYEQGLAKAKEIGAVKYLECSAVQNRGIREAFYEAAKVALEVKAQNTGSSQSRCVIQ

SEQ ID NO: 232 - DNA, 594 bp, Aspergillus nidulans
  Aspergillus nidulans FGSC A4
  CDS (1)..(594)
atggcccagcaacaggatgacaatgttatgcgaagaaagctggtgatcatcggtgacggcgcctgtgggaaaacgagtctgctgagtgtttttacattgggctacttccctacagtcccaacggtgttcgagagctatgtgacagactgccgggtagacggccggtcagtccagttagcattgtgggatacagccggtcaggaagattacgagcgactgcgtccgctagcctactccaaagcccacgttatcctgatcggatttgctgtcgacacgccagattcgctcgagaacgtcaagatcaagtggatcgaagaagcgaatgagcgatgccccggcgtacccatcatcctcgttgggctgaagaaggacctccgcgagaaccccggagcgatcgaggaaatgcgaaagaagtctctccgatttgtgtcgcccaaggaaggaagtgaaacagcaacgcagatcaaggcccgaaaataccttgagtgctcttcgctaacaggcgagggtgtggacgacgtctttgaagccgccacccgcgccgcgctcctcaccttcgataagcggaaatcctcatgttgcattgtgctatga

SEQ ID NO: 233 - protein, 197 aa, Aspergillus nidulans
  Aspergillus nidulans FGSC A4
MAQQQDDNVMRRKLVIIGDGACGKTSLLSVFTLGYFPTVPTVFESYVTDCRVDGRSVQLALWDTAGQEDYERLRPLAYSKAHVILIGFAVDTPDSLENVKIKWIEEANERCPGVPIILVGLKKDLRENPGAIEEMRKKSLRFVSPKEGSETATQIKARKYLECSSLTGEGVDDVFEAATRAALLTFDKRKSSCCIVL

SEQ ID NO: 234 - DNA, 711 bp, Candida albicans
  Candida albicans SC5314
  CDS (1)..(711): transl_table=12
atgagaagcattaaatcagtcgtagttggagatggtggagtaggtaaaacttgtttattgatatcctatactaccaatactttcccaaatgattatattccaactgttttcgataattattcagcctcagttatgattgatggcgaaccaatcaaattaggattatgggataccgctggtcaatcagaatatgatagattaagaccgttatcgtatccacaaacagaaatatttttatgttgtttctccgtgataagtcctgactcgttccaaaatgtcaaatctaaatggatacctgaaatattgcatcattgtccaaaggatattttaattttattgattggtaccaaggtcgatttacgagacgatttgcatgtattggacgagttgacagccaggaatttgagtcccgtcacttttgaccagggaaacaagttggctagagagattggtgccataaaatatatggaatgttctgctgctactcaagtcggtgtcaaggaaatatttgattacgcaataagggcagtgttagacccaccaaacgctaacaaaggtgaatatgttacaaatgacagtgtgccaggaatgggtgtcaacaattccagtggtagtaagaaacataacgaaaagaatgggtctggaacagcaactgctggtactggtaagaaaagaaaaattaagagagctaaaaaatgtactatattataa

SEQ ID NO: 235 - protein, 236 aa, Candida albicans
  Candida albicans SC5314
MRSIKSVVVGDGGVGKTCLLISYTTNTFPNDYIPTVFDNYSASVMIDGEPIKLGLWDTAGQSEYDRLRPLSYPQTEIFLCCFSVISPDSFQNVKSKWIPEILHHCPKDILILLIGTKVDLRDDLHVLDELTARNLSPVTFDQGNKLAREIGAIKYMECSAATQVGVKEIFDYAIRAVLDPPNANKGEYVTNDSVPGMGVNNSSGSKKHNEKNGSGTATAGTGKKRKIKRAKKCTIL

SEQ ID NO: 236 - DNA, 582 bp, Ustilago maydis
  Ustilago maydis 521
  CDS (1)..(582)
atgcagaccatcaagtgtgtagtcgtcggagacggtgccgtcggaaagacgtgtcttcttatctcgtatacaaccaacgccttcccgggcgaatacatccccacagtgtttgacaactattcggcaaacgtcatggtcgacggtaaacccgtctctctcggtctctgggatactgcgggtcaagaagactacgaccggttaagaccgctctcgtacccgcaaaccgacgtgttcctcgtgtgcttttcactggtgagtccaccttcgttcgaaaacgttcgaaccaagtggtggcccgaagtgtcgcatcacgctcccaacattcccaccatcctcgtgggaaccaagttggatctgcgcgaggatccagagacgattgccaagctgcgcgatcgcaggatgcagcctatcacgtatgcgcagggcaatcagatggcgagggacattcacgctaccaagtatttggagtgctctgcactcacccagaagggattgaagggcgtatttgatgaagcgatcaggagcgttttggctcctgcaccagtcaagagtaagaagaagaacaactgtatgattctttaa

SEQ ID NO: 237 - protein, 193 aa, Ustilago maydis
  Ustilago maydis 521
MQTIKCVVVGDGAVGKTCLLISYTTNAFPGEYIPTVFDNYSANVMVDGKPVSLGLWDTAGQEDYDRLRPLSYPQTDVFLVCFSLVSPPSFENVRTKWWPEVSHHAPNIPTILVGTKLDLREDPETIAKLRDRRMQPITYAQGNQMARDIHATKYLECSALTQKGLKGVFDEAIRSVLAPAPVKSKKKNNCMIL

SEQ ID NO: 238 - DNA, 645 bp, Ustilago maydis
  Ustilago maydis 521
  CDS (1)..(645)
atggcaccggcagcaattcgtaggaagctcgtaattgtcggcgacggtgcttgcggcaagacgagcttgctttgcgtctttgccattggcgagttcccgcaagagtatgaacccaccatcttcgaaaactacgtcgccgagatccgccttgatggcaagcctgtccagctggcgctatgggacaccgcgggtcaggaagaatacgagcgtcttcgtccactctcctactcacaagcacacgtcatcttgatcgcctttgccatcgatacacccgactcgctcgaaaacgtgcaagtcaagtggatggaggaggtacgtcaaatatgcggcccctcagtgcctgtgctcctggtaggctgcaagaaggatcttcgcgaagatgccatcgctaagggcaagccggttcagggtcactatgtagagagacaacaggctaaactggtagcagcacagatcggcgctcgatcgtatcacgaatgctcatcactcaacaaccaaggcgtcgacgccgtgttcgaagccgcgacgcgcgcggccatgcttgtgcgcaattccggtgcttcttcaggaggcgccatctcgcagagcaagaccaaggaggcattacacaacgatgctggctcttgcaaatgtatcgtcctctag

SEQ ID NO: 239 - protein, 214 aa, Ustilago maydis
  Ustilago maydis 521
MAPAAIRRKLVIVGDGACGKTSLLCVFAIGEFPQEYEPTIFENYVAEIRLDGKPVQLALWDTAGQEEYERLRPLSYSQAHVILIAFAIDTPDSLENVQVKWMEEVRQICGPSVPVLLVGCKKDLREDAIAKGKPVQGHYVERQQAKLVAAQIGARSYHECSSLNNQGVDAVFEAATRAAMLVRNSGASSGGAISQSKTKEALHNDAGSCKCIVL

SEQ ID NO: 240 - DNA, 585 bp, Ustilago maydis
  Ustilago maydis 521
  CDS (1)..(585)
atgtctgaactccgccgaaagcttgtcattgtcggagacggtgcttgtggtaagacttgtcttcttatcgtcttttccaagggcaccttccccgaggtgtacgtacccacggttttcgagaactacgttgctgatgtcgaggtggatggccgccacgtagagcttgcgctttgggataccgccggtcaggaggattacgatcgtctgcgtccgctctcgtacccggactcgcacgtgattctcatctgctttgcagttgactcgcccgactcgctggataacgtgcaggaaaagtggatttcggaagtgcttcacttttgccacagcctgcccatcatcctcgtgggctgcaaaaaggacttgcgacacgaccccaagattgtcgacgagctgcgaaagacgagccagcgtcccgtctctgccgaggagggtatggcggttgcacaaaagattggcgcagtgcgctacctcgagtgctcggccaagacgggcgagggcgttcgcgaagtgtttgagcacgccacgcgcgcggcgctggttcaaagaagccgtggctcgaggaagaaaggttgcaccgttctctaa

SEQ ID NO: 241 - protein, 194 aa, Ustilago maydis
  Ustilago maydis 521
MSELRRKLVIVGDGACGKTCLLIVFSKGTFPEVYVPTVFENYVADVEVDGRHVELALWDTAGQEDYDRLRPLSYPDSHVILICFAVDSPDSLDNVQEKWISEVLHFCHSLPIILVGCKKDLRHDPKIVDELRKTSQRPVSAEEGMAVAQKIGAVRYLECSAKTGEGVREVFEHATRAALVQRSRGSRKKGCTVL

SEQ ID NO: 242 - DNA, 582 bp, Cryptococcus neoformans
  Cryptococcus neoformans var. neoformans B-3501A
  CDS (1)..(582)
atgcagacaatcaagtgtgtcgtagtcggagacggtgccgttggaaagacctgcttgctcatctcgtacactaccaataagttcccatccgagtatgttcctaccgtctttgacaactacgccgtcagtgtaactatcggtgacgacccatacactctgggtctctttgatactgccggtcaagaagattatgaccgtctccgtcctctctcatacccccaaactgatgtcttcctcgtttgcttctctgtaacatctcccgcgtctttcgaaaacgtccgcgaaaaatggttccccgaaatcgcccaccattgccccggcgttcccgcacttattgtcggtacccaggtggatttgagggacgaccctgctcagacggagaagttgggaaggcagaggatgaagccgattacacaggacatgggagaaaggttggcgagagagttgggagccgtgaagtatgtggaatgttcggcgttgactcagagaggattgaagaacgtttttgacgaggccatcgtggcggcattagaaccccctatggcgaccaagaaaaagtctaaaaagtgtctcattctttaa

SEQ ID NO: 243 - protein, 193 aa, Cryptococcus neoformans
  Cryptococcus neoformans var. neoformans B-3501A
MQTIKCVVVGDGAVGKTCLLISYTTNKFPSEYVPTVFDNYAVSVTIGDDPYTLGLFDTAGQEDYDRLRPLSYPQTDVFLVCFSVTSPASFENVREKWFPEIAHHCPGVPALIVGTQVDLRDDPAQTEKLGRQRMKPITQDMGERLARELGAVKYVECSALTQRGLKNVFDEAIVAALEPPMATKKKSKKCLIL

SEQ ID NO: 244 - DNA, 651 bp, Cryptococcus neoformans
  Cryptococcus neoformans var. neoformans B-3501A
  CDS (1)..(651)
atgtccggagaaatcaggagaaagctcgttattgtcggcgacggtgcttgtggtaagacatgtcttcttatcgtgttcagcaagggcatgttccccgaggtgtacgtgcccaccgtctttgaaaactatgtcgccgatgtagaggtggacgggaagaaggtcgagctggcgttgtgggatactgctggacaggaggactatgaccgactccgacctctttcttaccccgactcccatgtcattctcatctgtttcgctattgactcccccgactcgcttgacaatgttcaagaaaagtggatttccgaggtccttcacttctgtcagggtctccccatcgtcctcgtggcgtgcaagaaggatctccgcgacgatggcaagactatccaggaccttgccaggatgaaccagaggcctgtttcccgggccgagggtatggccgttgcccaaaagattggggcgcagggctacgtcgagtgcagtgccaagacgggcgagggtgtcagggaagtgttccagactgctaccaggcatgctctccaggtgggtctcttgccgctgcatcgtacaccaccgctgaccgtgcgcagagcaaaaagtccaagtctggcagagggaagaagggttgtgtggtgctttagggctctataa

SEQ ID NO: 245 - protein, 216 aa, Cryptococcus neoformans
  Cryptococcus neoformans var. neoformans B-3501A
MSGEIRRKLVIVGDGACGKTCLLIVFSKGMFPEVYVPTVFENYVADVEVDGKKVELALWDTAGQEDYDRLRPLSYPDSHVILICFAIDSPDSLDNVQEKWISEVLHFCQGLPIVLVACKKDLRDDGKTIQDLARMNQRPVSRAEGMAVAQKIGAQGYVECSAKTGEGVREVFQTATRHALQVGLLPLHRTPPLTVRRAKSPSLAEGRRVVWCFRAL

SEQ ID NO: 246 - DNA, 594 bp, Cryptococcus neoformans
  Cryptococcus neoformans var. neoformans B-3501A
  CDS (1)..(594)
atgtccggagaaatcaggagaaagctcgttattgtcggcgacggtgcttgtggtaagacatgtcttcttatcgtgttcagcaagggcatgttccccgaggtgtacgtgcccaccgtctttgaaaactatgtcgccgatgtagaggtggacgggaagaaggtcgagctggcgttgtgggatactgctggacaggaggactatgaccgactccgacctctttcttaccccgactcccatgtcattctcatctgtttcgctattgactcccccgactcgcttgacaatgttcaagaaaagtggatttccgaggtccttcacttctgtcagggtctccccatcgtcctcgtggcgtgcaagaaggatctccgcgacgatggcaagactatccaggaccttgccaggatgaaccagaggcctgtttcccgggccgagggtatggccgttgcccaaaagattggggcgcagggctacgtcgagtgcagtgccaagacgggcgagggtgtcagggaagtgttccagactgctaccaggcatgctctccagagcaaaaagtccaagtctggcagagggaagaagggttgtgtggtgctttag

SEQ ID NO: 247 - protein, 197 aa, Cryptococcus neoformans
  Cryptococcus neoformans var. neoformans B-3501A
MSGEIRRKLVIVGDGACGKTCLLIVFSKGMFPEVYVPTVFENYVADVEVDGKKVELALWDTAGQEDYDRLRPLSYPDSHVILICFAIDSPDSLDNVQEKWISEVLHFCQGLPIVLVACKKDLRDDGKTIQDLARMNQRPVSRAEGMAVAQKIGAQGYVECSAKTGEGVREVFQTATRHALQSKKSKSGRGKKGCVVL

SEQ ID NO: 248 - DNA, 693 bp, Cryptococcus neoformans
  Cryptococcus neoformans var. neoformans B-3501A
  CDS (1)..(693)
atgtctgtaagtgctgggatccgaaacacctcgaaaagatcattcttgatcgagataactgacgccgcacagacgtacgacagcgcacctatgagacggccggatatcaaaaagaaactcgttgtggttggcgatggtggctgtggcaagacttgtctattaacggtctacgccgagaatcgttttcctgaagaatacgtcccaaccgtttttgagaatctcatgaccaccgttccttcccctaccgacccttccaaaatcattgaactggctctttgggatacagcaggacaggaggactttgacagactgcgaccattaagttataacgacacagatgtgatcctaatagtattcgcctgcaaccatcgaccaagcttgttgaacgtgcaagataagtggtatccagaaatggcccatttctgcgaaaatgtccccctcatcttagtttgcactaaaaccgatcttcgcgaagaccaacagaccgtctcccttatggctgctcaaggcacaacaccaatcagtgcttcagaaggtgaacgaatagcaaaggagattggagccagacggtatatggagtgctcagcaaaggctgggatgggtgtaggagaggtgttcgacgccgctattagagaaagcatgaagaagggagggttaaaaaagatgaagggcaggaagtgcgtggttctgtag

SEQ ID NO: 249 - protein, 230 aa, Cryptococcus neoformans
  Cryptococcus neoformans var. neoformans B-3501A
MSVSAGIRNTSKRSFLIEITDAAQTYDSAPMRRPDIKKKLVVVGDGGCGKTCLLTVYAENRFPEEYVPTVFENLMTTVPSPTDPSKIIELALWDTAGQEDFDRLRPLSYNDTDVILIVFACNHRPSLLNVQDKWYPEMAHFCENVPLILVCTKTDLREDQQTVSLMAAQGTTPISASEGERIAKEIGARRYMECSAKAGMGVGEVFDAAIRESMKKGGLKKMKGRKCVVL

SEQ ID NO: 250 - DNA, 675 bp, Cryptococcus neoformans
  Cryptococcus neoformans var. neoformans B-3501A
  CDS (1)..(675)
atgtcttcaagtcccaacaaccgtgcaattaggagaaagctcgtcatcgttggggacggcgcagcaggaaagacctcgttgctcaacgtgtttgcagtcggtcacttctcagagagctatgaaccaacagtgtttgacaactatgtgacggagattgaactcgacggaaagcctgttcaactggctttgtgggacactgccggtcaagaagagtatgaaagactacgacccctttcttattccaaagcgcacgtaattctcatcgcctttgcggtagatacacctgactcactggagaatgtcacccaaaaatggatagaggaagttaggtctatctgtggcaaagctatccctgtcattcttgtggcatgcaaggccgatctccgtgacaaggctgttgcgaatggcacttactctcccgaacgattcacagatcatgctactggccaaagaatagcagactccatcggcgcaaagggatactttgaaacttcagctttgcaaaaccgaaatgtcgatgccgtatttgaagctgctacgcgagcagcagtcttagtcagggatgcggggcatggcggggtgggtgccccgaatgggagctttgatgcgggaggacggaaagattgggggagggagaaggaggagaaaaaatttgggtgttgtgtcattgcttaa

SEQ ID NO: 251 - protein, 224 aa, Cryptococcus neoformans
  Cryptococcus neoformans var. neoformans B-3501A
MSSSPNNRAIRRKLVIVGDGAAGKTSLLNVFAVGHFSESYEPTVFDNYVTEIELDGKPVQLALWDTAGQEEYERLRPLSYSKAHVILIAFAVDTPDSLENVTQKWIEEVRSICGKAIPVILVACKADLRDKAVANGTYSPERFTDHATGQRIADSIGAKGYFETSALQNRNVDAVFEAATRAAVLVRDAGHGGVGAPNGSFDAGGRKDWGREKEEKKFGCCVIA

SEQ ID NO: 252 - DNA, 597 bp, Cryptococcus neoformans
  Cryptococcus neoformans var. neoformans B-3501A
  CDS (1)..(597)
atggctactactagaaacatcaagtgtgttgtcgttggcgacggtgccgttggaaagacatgtcttcttatcagttacacaaccaatgctttcccgggagaatatgtcccaacagtttttgacaactactcgagccaggtgattgtagatggtatgacggtatctttgggactgtgggatacagccggtcaagaagattacgaccgtcttcgacctttatcctacccgcagactgatgtcttccttctctgcttttccgtcgtctcccctgcttcctttgaaaacgtccgaaccaaatggtatcctgaaattcagcaccattcaccaggaactcctatcatccttgtcggtaccaagctcgatttgagagacgaccctatgcagattgaaaaactgagggaacgaaggcaagcgcccattggatattctcaaggctcatctatggcgaatgacatcaaggctgccaagtacctcgaatgctcggctttgacgcagaagaacctcaagtctgtttttgacgaggctatccggacggtcctcaaccctaatcgacgagcgggcaaggcgaagaagagcagcggatgtcttgtcatgtaa

SEQ ID NO: 253 - protein, 198 aa, Cryptococcus neoformans
  Cryptococcus neoformans var. neoformans B-3501A
MATTRNIKCVVVGDGAVGKTCLLISYTTNAFPGEYVPTVFDNYSSQVIVDGMTVSLGLWDTAGQEDYDRLRPLSYPQTDVFLLCFSVVSPASFENVRTKWYPEIQHHSPGTPIILVGTKLDLRDDPMQIEKLRERRQAPIGYSQGSSMANDIKAAKYLECSALTQKNLKSVFDEAIRTVLNPNRRAGKAKKSSGCLVM

SEQ ID NO: 254 - DNA, 585 bp, Strongylocentrotus purpuratus
  CDS (1)..(585)
atgcaggctattaaatgtgtcgtcgtcggggacggagctgtgggaaagacatgtcttctcatcagttacaccacaaatgcatttcccggagaatacattcccactgtatttgacaattattctgccaatgtgatggttgatggccgcccagtgaacttaggattgtgggatacagctggtcaggaagattatgacagactgagaccactctcttatccacagacagatgtatttctgatttgcttctcgttggtgagccctgcttcctttgacaacgttcgtgctaaatggtatccagaagtgagtcatcattgtcctaacacacccatcatcttggttggaaccaagttggatcttcgggatgatagagagacgattgacaagcttgctcagaggaacctatcaccagtcacataccctaagggtttattaatgatgaaggagattagtggtgtgaagtatttggaatgctctgctctcactcagaaaggactcaagacagtgtttgatgaagctattcgagctgtactctgcccagatcagaacaagaagaagaagaagggcaacaagtgtagattaatttga

SEQ ID NO: 255 - protein, 194 aa, Strongylocentrotus purpuratus
MQAIKCVVVGDGAVGKTCLLISYTTNAFPGEYIPTVFDNYSANVMVDGRPVNLGLWDTAGQEDYDRLRPLSYPQTDVFLICFSLVSPASFDNVRAKWYPEVSHHCPNTPIILVGTKLDLRDDRETIDKLAQRNLSPVTYPKGLLMMKEISGVKYLECSALTQKGLKTVFDEAIRAVLCPDQNKKKKKGNKCRLI

SEQ ID NO: 256 - DNA, 576 bp, Tribolium castaneum
  CDS (1)..(576)
atgcaaacaattaaatgtgtggtggtgggtgacggcgcagtgggtaaaacctgcctcctgataagttacactactaacaaattcccatcggaatatgtgcccacagtctttgataactatgcggtcactgtcatgatagggggcgagccctacacattggggctgttcgatactgcaggacaagaagattacgatcgattgcgacctcttagttatccccagactgacgttttcttagtgtgcttttctgtagtgagtccgtcctcgtttgaaaatgttaaggaaaaatgggtccccgaaataactcaccattgtcagaagacgccgttcctgttagtcggaacgcaggtcgatttacgcgatgatggtgctacgattgaaaagttggcgaaaaacaaacagaagccgatatcagtggaacagggagaaaagttagctaaagaattaaaagcggtcaaatatgtcgagtgttcggctttaacgcaaaaaggtctgaaaaatgttttcgatgaagctattctagccgcgttggaaccaccagaaccaattaaacgtaaaaagtgtgttattttgtaa

SEQ ID NO: 257 - protein, 191 aa, Tribolium castaneum
MQTIKCVVVGDGAVGKTCLLISYTTNKFPSEYVPTVFDNYAVTVMIGGEPYTLGLFDTAGQEDYDRLRPLSYPQTDVFLVCFSVVSPSSFENVKEKWVPEITHHCQKTPFLLVGTQVDLRDDGATIEKLAKNKQKPISVEQGEKLAKELKAVKYVECSALTQKGLKNVFDEAILAALEPPEPIKRKKCVIL

SEQ ID NO: 258 - DNA, 588 bp, Tribolium castaneum
  CDS (1)..(588)
atgtcatcgggtcgccccattaagtgtgtagttgtaggtgacggcactgtaggtaaaacctgcatgctcatatcgtacaccactgatagttttcctggagaatatgtccccacagttttcgataactattccgccccaatggtagtcgacgggatttcggttagtttaggtttgtgggatacagcaggtcaggaagattatgacaggctgaggcctctgtcttatccccaaacggacgtttttctcatttgctttagtgtagcgtcgccgtcgtcgttcgaaaacgttacttccaaatggtatcctgagatcaagcatcactgtcccgacgcccccatgattctagttggtaccaaaatagacttaagggatgatagggagacactgaccgctctcgcggaccagggcttgagccccatcaagcgcgagcaaggccagaaattggccaacaaaatcagggctgttaagtatatggaatgctcggctttgacgcaaagggggctcaagcaggtgtttgatgaagcggtcagggctgtcctaagacccgaaccgcagaaaaggcgacaacgcaagtgtcttcttatgtaa

SEQ ID NO: 259 - protein, 195 aa, Tribolium castaneum
MSSGRPIKCVVVGDGTVGKTCMLISYTTDSFPGEYVPTVFDNYSAPMVVDGISVSLGLWDTAGQEDYDRLRPLSYPQTDVFLICFSVASPSSFENVTSKWYPEIKHHCPDAPMILVGTKIDLRDDRETLTALADQGLSPIKREQGQKLANKIRAVKYMECSALTQRGLKQVFDEAVRAVLRPEPQKRRQRKCLLM

SEQ ID NO: 260 - DNA, 579 bp, Tribolium castaneum
  CDS (1)..(579)
atgcaggcgataaagtgcgtggttgtgggtgatggtgctgttggtaaaacatgcctcctcatcagttacacaacaaacgccttcccaggcgaatatataccgactgtttttgacaactattcggcaaatgttatggtagatgggaagccgattaatttggggctttgggatacagcaggccaggaagattatgacagattaagaccactttcctacccacaaacagatgtgttcttaatttgcttttcgttggtaaatccagcatcgtttgagaacgttcgggcgaaatggtaccctgaagtcagacaccattgtccaaacacaccaattatcctagttggcacaaaattggatttgcgtgacgatagaggcactattgagaaactgaaagacaagaaacttacacccatcacatatccgcagggtttggcgatggcgaaagaaatcagcgctgtaaaatacctagaatgttcagcgttgacgcaaaaaggacttaaaacagttttcgatgaagccattcgagcagttctttgccccgtaatgcaagtcaaacctaaacgtaaatgtgtgttattgtaa

SEQ ID NO: 261 - protein, 192 aa, Tribolium castaneum
MQAIKCVVVGDGAVGKTCLLISYTTNAFPGEYIPTVFDNYSANVMVDGKPINLGLWDTAGQEDYDRLRPLSYPQTDVFLICFSLVNPASFENVRAKWYPEVRHHCPNTPIILVGTKLDLRDDRGTIEKLKDKKLTPITYPQGLAMAKEISAVKYLECSALTQKGLKTVFDEAIRAVLCPVMQVKPKRKCVLL

SEQ ID NO: 262 - DNA, 588 bp, Tribolium castaneum
  CDS (1)..(588)
atgacgacgccttcgagagaagaaaacggccctccgggcgaaaacgttaaagtcacagtggtcggagacggtgtagtgggaaaaacctgtctcttgatttcatacacgaaggacgagttccccgaagaatatgttcccacagtattcgaacattacgggcaagacatcaccgtcgacgacgtcaaatacaacatgactctctgggacactgccggccaagaagactacgaaagactgcgccccctggcttaccccaatacgaaatgcttccttgtatgtttctccgtcgacgcttctataccgtcttacgagaacgttataattaaatgggtgccagaagtcaggcaccacaatccacacacgcccatagttctagtagccactaaaatagatctcagagatgatccaagtgtccactgttactcaacccaggacggcaaaaaattaaaaaggaaagtcaaagccgaaggatacgtcgaatgctctgccaaaaccagggaaggactgaaggaagtcttcgaagaggcgatacgagcgtacaagaagaccaaaatcaaagcgagacaagtcaactgtgctttgttataa

SEQ ID NO: 263 - protein, 195 aa, Tribolium castaneum
MTTPSREENGPPGENVKVTVVGDGVVGKTCLLISYTKDEFPEEYVPTVFEHYGQDITVDDVKYNMTLWDTAGQEDYERLRPLAYPNTKCFLVCFSVDASIPSYENVIIKWVPEVRHHNPHTPIVLVATKIDLRDDPSVHCYSTQDGKKLKRKVKAEGYVECSAKTREGLKEVFEEAIRAYKKTKIKARQVNCALL

SEQ ID NO: 264 - DNA, 600 bp, Tribolium castaneum
  CDS (1)..(600)
atgtctagcaagaaaattgttgtaattggtgacggtgcgtgtggtaaaacgagtctgtcagttgccttcagccaaaacgaatttccggaaacccacgttccgacaatttacgatacgtacaccaaaacaataactgtcgatgagcaaaatgtggaactcacaatctgggataccgccggtgaggaagattacgacagacttaggcctttgtcgtacacaaaggcaagtgttataatcgtgtgctttacaattgacaatccggtttctttgaaaaacgttaagacaagatgggcgcccgaagtcaaacatttctgccggaaagtccccatactcctagtcggtaataaattagatttgcgaaataataaagaaacagttgaagatctgaaaagaaataacatgcaacccgttaagttcgaacaaggtttgaaggtgtcgaagaaaattggggcacggaagtacatcgaatgctcggctaaacatatggtgggggtgcaggacgttttcagaaatgctgccagaattgccttgaagacgccacagaaaaaaggactcaagcggttatgtcgatgtgtccgtgttccgtgcaaaactacctga

SEQ ID NO: 265 - protein, 199 aa, Tribolium castaneum
MSSKKIVVIGDGACGKTSLSVAFSQNEFPETHVPTIYDTYTKTITVDEQNVELTIWDTAGEEDYDRLRPLSYTKASVIIVCFTIDNPVSLKNVKTRWAPEVKHFCRKVPILLVGNKLDLRNNKETVEDLKRNNMQPVKFEQGLKVSKKIGARKYIECSAKHMVGVQDVFRNAARIALKTPQKKGLKRLCRCVRVPCKTT

SEQ ID NO: 266 - DNA, 579 bp, Tribolium castaneum
  CDS (1)..(579)
atgtcctccgtccaaaagaagctcatcattgtgggcgacggcgcctgcggcaagacctgcctcctgatcgccttcgccaaagacatcttcaactccgaataccgccccacagttttcgaaaactacgtcgccgatgtggagctggacgccctcaccgtggagctctccctctgggacacctcaggccaggaggactacgaccgccttagacccatccagtaccccgaaacggacgtggtgctgatatgcttctcggtgatgtggagggactctcttttgaacgtctcggcaaagtggtgccccgaagtcaggcatttctgccccaacgtccctatactgctcatagggacgaagaacgatctcagggaggacaaggaggagttggagaagttgaaaatgatgaagaaatccccggttacgagggacgaagccgaggccatggcgaggaccattggggccgtttgctacatcgaatgttcagccaagaccaaatataacgtgcaggaggtgttcaaggaggccgcgagggccacaatcgcaaaacgaaagaagcggaaacaacgctgtgtactaatttga

SEQ ID NO: 267 - protein, 192 aa, Tribolium castaneum
MSSVQKKLIIVGDGACGKTCLLIAFAKDIFNSEYRPTVFENYVADVELDALTVELSLWDTSGQEDYDRLRPIQYPETDVVLICFSVMWRDSLLNVSAKWCPEVRHFCPNVPILLIGTKNDLREDKEELEKLKMMKKSPVTRDEAEAMARTIGAVCYIECSAKTKYNVQEVFKEAARATIAKRKKRKQRCVLI

SEQ ID NO: 268 - DNA, 579 bp, Tribolium castaneum
  CDS (1)..(579)
atggcagccatcaggaagaagctggtgattgtgggcgacggcgcctgcggcaagacctgcctcctcatcgtcttcagcaaggaccagttccccgaggtgtacgtgcccaccgtgttcgagaactatgtggccgacatcgaggtggacggcaagcaggtggagctcgcgctgtgggacacggccggccaggaggactacgaccggctgcggccgctgtcctaccccgacaccgacgtcatcctcatgtgcttctcggtcgactcgcccgactcgctcgagaacatccccgagaagtggacgcccgaggtgaagcacttctgccccaacgtgcccatcatcctcgtcggcaacaagaaggacctgcgcaacgaccccaacaccatcaacgagctcaagaagatgaagcaggagccggtcaagccgcaggacgggcgcgccatggccgagaagatcaacgccttcgcctacctggagtgctccgccaagagcaaggagggcgtgagggaggtgttcgagaacgccacgcgcgcggccttacaagtcaagaagaagaagaagcaccgctgcgccctgctgtga

SEQ ID NO: 269 - protein, 192 aa, Tribolium castaneum
MAAIRKKLVIVGDGACGKTCLLIVFSKDQFPEVYVPTVFENYVADIEVDGKQVELALWDTAGQEDYDRLRPLSYPDTDVILMCFSVDSPDSLENIPEKWTPEVKHFCPNVPIILVGNKKDLRNDPNTINELKKMKQEPVKPQDGRAMAEKINAFAYLECSAKSKEGVREVFENATRAALQVKKKKKHRCALL

SEQ ID NO: 270 - DNA, 591 bp, Cryptococcus neoformans
  Cryptococcus neoformans var
  CDS (1)..(591)
atgcagactatcaaatgtgtcgtcgtgggtgacggcgctgttggaaagacatgtctgttgatatcgtatacgacaaacaagtttccatcggaatatgtgcctacggtgtttgataactatgcggtgactgttatgattggcgatagcccttatacgctcgggctattcgacaccgctggccaagaagactatgaccgccttcgcccgctatcttacccgcagacagacgtcttcctcatctgcttctccatcgcgtcccccgcttcgttcgagaatgtccgtgaaaaatggtttcacgaaatctcacaccactgccctggggcgccttgcctgatagtggggacgcaggtcgatttgagggatgatccaaagcaggtggagaggatgatggcgagtcagagggggggcagggcggcggggttgataacgcaagagcaaggggagaggttggcgagagaattgggggggagaaagtatgtagagtgttcggcgttgacgcaaaaggggttgaagaatgtgtttgatgaggcaatcgtagcggctcttgaaccgccagtcgtgaaaaagaccaaaaagtgcttgatcctctag

SEQ ID NO: 271 - protein, 196 aa, Cryptococcus neoformans
  Cryptococcus neoformans var
MQTIKCVVVGDGAVGKTCLLISYTTNKFPSEYVPTVFDNYAVTVMIGDSPYTLGLFDTAGQEDYDRLRPLSYPQTDVFLICFSIASPASFENVREKWFHEISHHCPGAPCLIVGTQVDLRDDPKQVERMMASQRGGRAAGLITQEQGERLARELGGRKYVECSALTQKGLKNVFDEAIVAALEPPVVKKTKKCLIL

SEQ ID NO: 272 - DNA, 582 bp, Cryptococcus neoformans
  Cryptococcus neoformans var
  CDS (1)..(582)
atgcagacaatcaagtgtgtcgtagtcggagacggtgccgttggaaagacctgcttgctcatctcgtacactaccaacaagttcccatccgagtatgttccaaccgtctttgacaactacgccgtcagtgtaaccatcggtgacgacccatacactcttggactctttgatactgccggtcaagaagattatgaccgtctccgtccactctcataccctcaaactgatgtcttcctcgtttgcttctctgtaacatctcccgcgtcattcgaaaacgtccgcgaaaagtggtttcccgaaatcgcccatcattgcccaggcgtccccgcacttattgtcggtacccaagtggacttgagggatgaccccgcccagatggagaagttgggaaggcagaagatgaagccgattacacaggatatgggagaaagattggcgagagaattgggagcggtgaaatatgtggagtgttcggcgttgacgcagaggggattgaagaacgtttttgacgaggcaatcgtggcggcattagaaccccctatggcgactaagaaaaagtctaaaaagtgcctcatcctttga

SEQ ID NO: 273 - protein, 193 aa, Cryptococcus neoformans
  Cryptococcus neoformans var
MQTIKCVVVGDGAVGKTCLLISYTTNKFPSEYVPTVFDNYAVSVTIGDDPYTLGLFDTAGQEDYDRLRPLSYPQTDVFLVCFSVTSPASFENVREKWFPEIAHHCPGVPALIVGTQVDLRDDPAQMEKLGRQKMKPITQDMGERLARELGAVKYVECSALTQRGLKNVFDEAIVAALEPPMATKKKSKKCLIL

SEQ ID NO: 274 - DNA, 600 bp, Epichloe festucae
  CDS (1)..(600)
atggctcaacccggtgttcagtctctaaagtgtgtcgtgaccggcgacggtgccgttggcaagacatgtcttctcatttcatacacaaccaatgccttccccggcgagtacattccgacagtcttcgataactactcggcgagtgtcatggtcgatggaaagcccatcagccttggattgtgggatacggctggccaggaagattacgatcgattgagacccttgtcatatcctcaaacagacgtctttctcatctgcttctccatcgtctcccctccgtcatttgacaacgtcaaggccaagtggtaccccgagatcgatcatcatgcacccaacattcccatcatcttggtcggcaccaagcttgatttgcgagaggacgccgccacattggactcgttgagacaaaagcgaatggagccggtatcatacgagcaagcattggcttgcgcacgagaaatcaaggcttacaagtacctggagtgctctgccctcacccagcgcaacctgaagagcgtattcgacgaggctattcgtgctgtgttgaacccccgtccacaaccgtccaagcacaagaagtccaagtgttcaatcctgtaa

SEQ ID NO: 275 - protein, 199 aa, Epichloe festucae
MAQPGVQSLKCVVTGDGAVGKTCLLISYTTNAFPGEYIPTVFDNYSASVMVDGKPISLGLWDTAGQEDYDRLRPLSYPQTDVFLICFSIVSPPSFDNVKAKWYPEIDHHAPNIPIILVGTKLDLREDAATLDSLRQKRMEPVSYEQALACAREIKAYKYLECSALTQRNLKSVFDEAIRAVLNPRPQPSKHKKSKCSIL

SEQ ID NO: 276 - DNA, 579 bp, Maconellicoccus hirsutus
  CDS (1)..(579)
atggccgcgattcgtaagaagttggttatcgtaggagacggcgcttgcggtaaaacttgcctgttgatagtattcagcaaagatcaatttcccgaagtctacgttccgactgttttcgaaaattacgtcgccgacatcgaagttgacggcaaacaagttgaattggccttatgggatacggctggccaagaagactatgatcgtctgcgtccgttatcgtatccggataccgatgttattctgatgtgtttctcaatcgattcgccggattcattggagaacataccggaaaaatggactccagaagtgaagcatttctgtccaaacgtaccgattattttagttggtaacaaaaaagacttgaggaatgatccggtcactattaaagagttggctaaaatgaaacaagaaccagttaagcctgaagaaggtcgtgccatggccgaaaagatcaacgcttttgcttatttggaatgttcggctaaaagtaaagaaggtgttagggaagtgtttgaaacatctactagagccgctttacaagtgaaaaagaagaagaaggggcgttgtcgtttgttataa

SEQ ID NO: 277 - protein, 192 aa, Maconellicoccus hirsutus
MAAIRKKLVIVGDGACGKTCLLIVFSKDQFPEVYVPTVFENYVADIEVDGKQVELALWDTAGQEDYDRLRPLSYPDTDVILMCFSIDSPDSLENIPEKWTPEVKHFCPNVPIILVGNKKDLRNDPVTIKELAKMKQEPVKPEEGRAMAEKINAFAYLECSAKSKEGVREVFETSTRAALQVKKKKKGRCRLL

SEQ ID NO: 278 - DNA, 693 bp, Oryza sativa
  Oryza sativa subsp
  CDS (1)..(693)
atggcgtccagcgcctcccggttcatcaagtgcgtcacggtgggcgacggcgccgtgggcaagacctgcatgctcatctgctacaccagcaacaagttccccactgactacataccaacggtgttcgacaatttcagcgcaaacgttgttgtggacagcaccacggtgaatctgggcctctgggatactgctgggcaagaggattacaaccggctcaggcctctgagctatcgtggtgctgatgttttcgtgcttgccttctctcttgtgagccgagctagctatgaaaatattatgaagaagtggataccggagctacagcattatgcacccggcgtgcccattgtgttggttggcacaaaattggatctccgtgaagacaagcactacttgttggaccatcctggcatgatacctgttaccacagcacagggtgaagaacttcgaaaacaaataggtgctgcttattacattgagtgcagctcaaagacacaacagaatgtcaaaggtgtgtttgatgctgctatcaaggtagtaatccagcctccaactaagcagagggaaaagaagaaaaagaaatcacgacaaggatgctctatgatgatgtatcccgtctatataaaagaacctagcttttgtggtggtggaacatgttccgtggaaggaaaatgtcatgcttcaaatcctgattga

SEQ ID NO: 279 - protein, 230 aa, Oryza sativa
  Oryza sativa subsp
MASSASRFIKCVTVGDGAVGKTCMLICYTSNKFPTDYIPTVFDNFSANVVVDSTTVNLGLWDTAGQEDYNRLRPLSYRGADVFVLAFSLVSRASYENIMKKWIPELQHYAPGVPIVLVGTKLDLREDKHYLLDHPGMIPVTTAQGEELRKQIGAAYYIECSSKTQQNVKGVFDAAIKVVIQPPTKQREKKKKKSRQGCSMMMYPVYIKEPSFCGGGTCSVEGKCHASNPD

SEQ ID NO: 280 - DNA, 582 bp, Oryza sativa
  Oryza sativa subsp
  CDS (1)..(582)
atggcgtccagcgcgtcgcggttcatcaagtgcgtcacggtcggggacggcgccgtcggcaagacctgcatgctcatctgctacaccagcaacaagttccccactgattacgtacccactgtttttgacaatttcagtgcaaacgtggtggtcgacggcaccacggtgaatttgggtctctgggatactgcagggcaggaagattacaacagattgaggccgctaagctaccgtggcgccgatgtctttgtgcttgccttctccctatggttaccagagcttcagcattatgcaccaggggtgccaattgtgttggttgggaccaaattggatcttcgtgaagataaacactacttacttgaccatcctagcttggtgcctgtgactacagcacagggagaggaactccgcaagcacattggcgcaacgtgttacatcgaatgcagctcaaagacacagcagaatgtaaaagctgtgtttgatgctgccatcaagctgcaagggtgtcatgtccagaagaaggctagtatgcttcaagtgaacaagaggggttctttgatgagcagagcagaggaaggttaa

SEQ ID NO: 281 - protein, 193 aa, Oryza sativa
  Oryza sativa subsp
MASSASRFIKCVTVGDGAVGKTCMLICYTSNKFPTDYVPTVFDNFSANVVVDGTTVNLGLWDTAGQEDYNRLRPLSYRGADVFVLAFSLWLPELQHYAPGVPIVLVGTKLDLREDKHYLLDHPSLVPVTTAQGEELRKHIGATCYIECSSKTQQNVKAVFDAAIKLQGCHVQKKASMLQVNKRGSLMSRAEEG

SEQ ID NO: 282 - DNA, 645 bp, Oryza sativa
  Oryza sativa subsp
  CDS (1)..(645)
atggcgtccagcgcctcccggttcatcaagtgcgtcacggtgggcgacggcgccgtgggcaagacctgcatgctcatctgctacaccagcaacaagttccccactgactacataccaacggtgttcgacaatttcagcgcaaacgttgttgtggacagcaccacggtgaatctgggcctctgggatactgctgggcaagaggattacaaccggctcaggcctctgagctatcgtggtgctgatgttttcgtgcttgccttctctcttgtgagccgagctagctatgaaaatattatgaagaagtggataccggagctacagcattatgcacccggcgtgcccattgtgttggttggcacaaaattggatctccgtgaagacaagcactacttgttggaccatcctggcatgatacctgttaccacagcacagggtgaagaacttcgaaaacaaataggtgctgcttattacattgagtgcagctcaaagacacaacagaatgtcaaaggtgtgtttgatgctgctatcaaggaacatgttccgtggaaggaaaatgtcatgcttcaaatcctgattgatcgagatgtcccttacatgatgcaatgttctgggtgcaacctcaagctggcaacctttggagtctga

SEQ ID NO: 283 - protein, 214 aa, Oryza sativa
  Oryza sativa subsp
MASSASRFIKCVTVGDGAVGKTCMLICYTSNKFPTDYIPTVFDNFSANVVVDSTTVNLGLWDTAGQEDYNRLRPLSYRGADVFVLAFSLVSRASYENIMKKWIPELQHYAPGVPIVLVGTKLDLREDKHYLLDHPGMIPVTTAQGEELRKQIGAAYYIECSSKTQQNVKGVFDAAIKEHVPWKENVMLQILIDRDVPYMMQCSGCNLKLATFGV

SEQ ID NO: 284 - DNA, 579 bp, Paracoccidioides brasiliensis
  CDS (1)..(579)
atggttgtggctactatcaaatgcgttgtggttggagacggtgctgtcggcaagacatgtctactgatttcgtacaccaccaacaagttcccctctgaatacgtcccgaccgtcttcgataactatgcggttacagtgatgatcggagatgagccatataccctgggactcttcgataccgcaggacaagaggattatgaccgtctacgaccactatcataccctcaaaccgatgtgtttctcgtctgtttctccgttacatccccagcatctttcgagaacgtccgtgagaaatggtttcctgaggtccatcaccactgcccaggcgttccctgcctgattgtaggcacccaaaccgacttgcgcgacgaccccagcgtacgagaaaagttggccaagcagaagatgcagcccgtgcgaaaagaggacggtgaccgtatggcaaaggatctgggtgctgtcaaatacgtcgagtgctccgcgttgactcaatataaacttaaggacgtgttcgatgaggcaatcgtcgctgcgctggaaccagccccaagtaagaagcctaagtgtgtcatcttttaa

SEQ ID NO: 285 - protein, 192 aa, Paracoccidioides brasiliensis
MVVATIKCVVVGDGAVGKTCLLISYTTNKFPSEYVPTVFDNYAVTVMIGDEPYTLGLFDTAGQEDYDRLRPLSYPQTDVFLVCFSVTSPASFENVREKWFPEVHHHCPGVPCLIVGTQTDLRDDPSVREKLAKQKMQPVRKEDGDRMAKDLGAVKYVECSALTQYKLKDVFDEAIVAALEPAPSKKPKCVIF

SEQ ID NO: 286 - DNA, 597 bp, Vitis vinifera
  CDS (1)..(597)
atggcttcaagtgcatcgaagttcatcaaatgtgtgacggtaggagatggggctgtggggaagacttgcatgcttatttgctacaccagcaacaagtttccatctgactatataccaacagtgtttgacaacttcagtgcaaatgtggtagctgagggcaccactgttaacttgggcctctgggacacagctgggcaagaagattacaatagattaaggcccttgagctatcaaggggcagatgtcttcatcttagccttctcattagtgagtcgggcaagctacgaaaatgtacttaaaaagtggattcctgagcttcagcattttgcccctggaattccaattgtacttgttggcacaaaattggatcttcgtgaggacaaacactatttggctgatcatcctggattggttcctgtgaccactgcacagggtgaggaactccgcaaacagattggtgctgcatattatattgaatgcagctcaaaaactcagcagaatgtgaaagctgtctttgatgctgcaatcaaggtagttatcaagccacaacagaaacaaaaggagaagaaaaaaaaacggcatcgaggatggctgtaa

SEQ ID NO: 287 - protein, 198 aa, Vitis vinifera
MASSASKFIKCVTVGDGAVGKTCMLICYTSNKFPSDYIPTVFDNFSANVVAEGTTVNLGLWDTAGQEDYNRLRPLSYQGADVFILAFSLVSRASYENVLKKWIPELQHFAPGIPIVLVGTKLDLREDKHYLADHPGLVPVTTAQGEELRKQIGAAYYIECSSKTQQNVKAVFDAAIKVVIKPQQKQKEKKKKRHRGWL

SEQ ID NO: 288 - DNA, 597 bp, Vitis vinifera
  CDS (1)..(597)
atgagtgcttcaaggttcattaagtgcgtcactgtcggtgacggcgccgtcggcaagacttgcatgcttatctcctacaccagcaacactttccccacggattatgtgccaactgtatttgacaatttcagtgcaaatgttgtggtggatgggagcactgttaatctagggttgtgggatactgcaggccaggaggattacaataggttgagacctttgagctaccgtggtgcagatgtctttctgcttgctttctccctcattagcaaggctagctatgaaaatgttgccaagaaatggattcctgagttgaggcattatgcacccggtgttccaataattcttgtcgggacaaagcttgatcttcgagatgataagcagttcttcatagatcaccctggtgcagtgcccattaccacagctcagggagaggaactgagaaagctgattggagctcctgcttacattgaatgtagttcaaaaacacagcagaacgtgaaggctgtctttgatgcggccattaaggtggttctccagccaccaaagcagaagaagagaaagaagagaaaggcacagaaagcttgttctatattgtga

SEQ ID NO: 289 - protein, 198 aa, Vitis vinifera
MSASRFIKCVTVGDGAVGKTCMLISYTSNTFPTDYVPTVFDNFSANVVVDGSTVNLGLWDTAGQEDYNRLRPLSYRGADVFLLAFSLISKASYENVAKKWIPELRHYAPGVPIILVGTKLDLRDDKQFFIDHPGAVPITTAQGEELRKLIGAPAYIECSSKTQQNVKAVFDAAIKVVLQPPKQKKRKKRKAQKACSIL

SEQ ID NO: 290 - DNA, 633 bp, Vitis vinifera
  CDS (1)..(633)
atgagcgcttcgaagttcattaaatgtgttacagttggagatggagctgtagggaaaacctgtatgctaatttgttacacaagtaacaagttccccactgactatatacctacagtgtttgacaatttcagtgctaatgtagctgtggatgggagcattgtcaacttgggtctttgggatactgcaggtcaggaagactatagcaggttgaggccactgagttatagaggtgcagacatatttgttttagctttttcattgatcagcagggcaagctatgaaaatgttctcaagaagtggatgcctgaacttcggcgatttgcacccaatgttccaatcgttcttgttggaacaaagttagatcttcgtgaagacaaaggatatctagctgatcatatgggatccaatgtcataacatctgcccaaggagaggaactgaggaagcagattggtgcagcagcttatattgagtgcagttctaagactcaacagaatgtcaaagcggtttttgatactgcaatcaaggttgttctccaacctccaaggaggaaggaggtggccaggaagaagaggcgcagaagcacagggtgctcaattgtgagcattgtatgcggaggctgtgctgcagcataa

SEQ ID NO: 291 - protein, 210 aa, Vitis vinifera
MSASKFIKCVTVGDGAVGKTCMLICYTSNKFPTDYIPTVFDNFSANVAVDGSIVNLGLWDTAGQEDYSRLRPLSYRGADIFVLAFSLISRASYENVLKKWMPELRRFAPNVPIVLVGTKLDLREDKGYLADHMGSNVITSAQGEELRKQIGAAAYIECSSKTQQNVKAVFDTAIKVVLQPPRRKEVARKKRRRSTGCSIVSIVCGGCAAA

SEQ ID NO: 292 - DNA, 594 bp, Vitis vinifera
  CDS (1)..(594)
  misc_feature (234)..(234): w is a or t
atgagcgcctctaggtttataaagtgcgttacggtcggtgatggtgctgtcggcaaaacctgcatgctgatttcctacaccagcaacactttccctacggattatgtgccaactgtttttgacaatttcagtgcaaatgtggttgttgatgggagcactgtcaatttagggttgtgggatactgctggccaggaggattacaatagattaagacccttgagctatcgaggggcwgacgtttttattcttgcattctctctcattagcaaggccagctatgaaaatgttgccaaaaagtggattcctgaactgaggcattatgcacctggtgttccaataattcttgttggaaccaagcttgatcttcgggatgataagcaattctttgtagaccaccctggtgcagtgcctattactacagctcagggagaagaactgaagaaagtgattggtgcgcctgcctatattgaatgtagctcaaaaacacagcagaacgtgaaggctgtttttgatgcagctatcaaggtggtgctccagccacctaagcagaagaagaagaagaagaaggcacaaaagacctgctctatattgtga

SEQ ID NO: 293 - protein, 197 aa, Vitis vinifera
MSASRFIKCVTVGDGAVGKTCMLISYTSNTFPTDYVPTVFDNFSANVVVDGSTVNLGLWDTAGQEDYNRLRPLSYRGADVFILAFSLISKASYENVAKKWIPELRHYAPGVPIILVGTKLDLRDDKQFFVDHPGAVPITTAQGEELKKVIGAPAYIECSSKTQQNVKAVFDAAIKVVLQPPKQKKKKKKAQKTCSIL

SEQ ID NO: 294 - DNA, 591 bp, Musa acuminata
  CDS (1)..(591)
atgagcgcgtcgaggtttataaagtgcgtcacggtgggggacggtgccgtcggcaagacttgcatgcttatctcctacaccagcaacactttccccacggattatgttcctaccgtttttgacaatttcagcgcaaatgtagtggtggatggtaacacagttaacttaggtttgtgggatactgcaggccaagaggattacaatagattaagacctttgagctaccgtggtgcagatgttttcttgcttgctttctctctcattagtaaagccagctatgaaaatgttgccaagaagtggattcctgagctaaggcactatgcacctggtgtgcccataattcttgttggaacaaagcttgatcttcgggatgagcagcagttctttatagatcacccaggtgctgttcccataagtaccgctcagggggaggagctgcggaagcaaataggtgctgcttcgtacatagagtgcagttcaaagactcagcaaaatgtcaaggcggtattcgatgcggccatcaaggtcgtgcttcagccacccaagcagaagaagaaaaaaaagcaacagaaaggttgctccatattgtga

SEQ ID NO: 295 - protein, 196 aa, Musa acuminata
MSASRFIKCVTVGDGAVGKTCMLISYTSNTFPTDYVPTVFDNFSANVVVDGNTVNLGLWDTAGQEDYNRLRPLSYRGADVFLLAFSLISKASYENVAKKWIPELRHYAPGVPIILVGTKLDLRDEQQFFIDHPGAVPISTAQGEELRKQIGAASYIECSSKTQQNVKAVFDAAIKVVLQPPKQKKKKKQQKGCSIL

SEQ ID NO: 296 - DNA, 597 bp, Vitis vinifera
  CDS (1)..(597)
atgagtgcttcaaggttcattaagtgcgtcactgtcggtgacggcgccgtcggcaagacttgcatgcttatctcctacaccagcaacactttccccacggattatgtgccaactgtatttgacaatttcagtgcaaatgttgtggtggatgggagcactgttaatctagggttgtgggatactgcaggtaaagaggattacaataggttgagacctttgagctaccgtggtgcagatgtctttctgcttgctttctccctcattagcaaggctagctatgaaaatgttgccaagaaatggattcctgagttgaggcattatgcacccggtgttccaataattcttgtcgggacaaagcttgatcttcgagatgataagcagttcttcatagatcaccctggtgcagtgcccattaccacagctcagggagaggaactgagaaagctgattggagctcctgcttacattgaatgtagttcaaaaacacagcagaacgtgaaggctgtctttgatgcggccattaaggtggttctccagccaccaaagcagaagaagagaaagaagagaaaggcacagaaagcttgttctatattgtga

SEQ ID NO: 297 - protein, 198 aa, Vitis vinifera
MSASRFIKCVTVGDGAVGKTCMLISYTSNTFPTDYVPTVFDNFSANVVVDGSTVNLGLWDTAGKEDYNRLRPLSYRGADVFLLAFSLISKASYENVAKKWIPELRHYAPGVPIILVGTKLDLRDDKQFFIDHPGAVPITTAQGEELRKLIGAPAYIECSSKTQQNVKAVFDAAIKVVLQPPKQKKRKKRKAQKACSIL

SEQ ID NO: 298 - DNA, 600 bp, Vitis vinifera
  CDS (1)..(600)
atgagtacagtaccaagcaggttcattaagtgcgtgacagttggagatggagctgttgggaagacttgccttctcatctcctacactagcaacaccttcccaactgactatgttccaactgtttttgataatttcagtgccaatgttttggctgatgggcagactattaatctgggtctctgggatactgctggtcaagaagactataacaggctaaggcctttgagttatagaggagctgatgttttcctccttgccttctctcttataagtaggcctagctttgaaaacatatcgaaaaaaaagtgggtaccagagctgagacattatgccccatcagtgcccattgttctcgtggggaccaaactagatttgagagaagataagcagttccacatggattatccaggggcgtgtaccatttcaacagaacagggtgaagaactaaagaagcaaataggagcattggcatacatagagtgcagctccaaaacacagcagaacgtgaaggcagtgtttgatgctgcaatcaaggtggttctgcagcctccgaagctcagtaaacgaaagcgaaaaaagagggcatgccatgttctttaa

SEQ ID NO: 299 - protein, 199 aa, Vitis vinifera
MSTVPSRFIKCVTVGDGAVGKTCLLISYTSNTFPTDYVPTVFDNFSANVLADGQTINLGLWDTAGQEDYNRLRPLSYRGADVFLLAFSLISRPSFENISKKKWVPELRHYAPSVPIVLVGTKLDLREDKQFHMDYPGACTISTEQGEELKKQIGALAYIECSSKTQQNVKAVFDAAIKVVLQPPKLSKRKRKKRACHVL

SEQ ID NO: 300 - DNA, 591 bp, Vitis vinifera
  CDS (1)..(591)
atgagtgcttcaaggttcatcaagtgcgtcactgtaggggatggtgccgttggcaaaacttgtctccttatctcctataccagcaacactttccccacggattatgtgccaactgttttcgacaatttcagtgcaaatgtggttgtcaatggggccactgttaaccttgggttgtgggatactgctgggcaggaggattacaacagattgagacctttgagttatcgcggggcagatgttttcatattggcattctctctcatcagcaaggccagctatgaaaatgtttccaagaagtggattccagaattgaagcattatgcacctggtgttccgatagttcttgttggcactaagcttgatcttcgggaagacaagcagttcttcatagaccatcctggtgctgtgcccatctctgcagctcagggagaggagctgaagaggctgattgatgcccctgcttacatagaatgcagtgccaaaacacagcagaatatcaaggcagtgtttgatcaggccattagggttgtgctccaaccacccaagcagaagaaaaagaagtcaaagtctaaggtctgctccatattgtga

SEQ ID NO: 301 - protein, 196 aa, Vitis vinifera
MSASRFIKCVTVGDGAVGKTCLLISYTSNTFPTDYVPTVFDNFSANVVVNGATVNLGLWDTAGQEDYNRLRPLSYRGADVFILAFSLISKASYENVSKKWIPELKHYAPGVPIVLVGTKLDLREDKQFFIDHPGAVPISAAQGEELKRLIDAPAYIECSAKTQQNIKAVFDQAIRVVLQPPKQKKKKSKSKVCSIL

SEQ ID NO: 302 - DNA, 630 bp, Medicago truncatula
  CDS (1)..(630)
atgagtgcatcaaagttcattaaatgtgtcactgttggtgatggtgctgttggaaaaacttgcatgctcatttgttacaccagtaacaaattccccactgattatataccaacagtatttgataattttagtgcaaatgtagctgtggatggaagcattgtgaatttggggctatgggacactgcaggccaggaagactatagcaggttgaggccactgagctatagaggagctgatatatttgtcttagcattctcattgattagtagagctagctatgaaaatgttcttaagaagtggatgccagaattgcgcagattcgcccctaatgtaccaattgttcttgttggcacaaagttggatcttcgtgaagatcgtggatatttcgctgatcacacgggatataatgttataacatctgctgagggagaagaactgaggaaacaaattggggctgcagcgtacattgagtgcagctcaaagactcaacagaatgtgaaagctgtttttgatactgccattaaggttgttctccaacctccaaggaggaaagaaatgccgaggaagaaaaggcaaagaaggtccggttgctcgtttgccggtattgtgtgtggaggttgtgctgcttaa

SEQ ID NO: 303 - protein, 209 aa, Medicago truncatula
MSASKFIKCVTVGDGAVGKTCMLICYTSNKFPTDYIPTVFDNFSANVAVDGSIVNLGLWDTAGQEDYSRLRPLSYRGADIFVLAFSLISRASYENVLKKWMPELRRFAPNVPIVLVGTKLDLREDRGYFADHTGYNVITSAEGEELRKQIGAAAYIECSSKTQQNVKAVFDTAIKVVLQPPRRKEMPRKKRQRRSGCSFAGIVCGGCAA

SEQ ID NO: 304 - DNA, 585 bp, Cordyceps militaris
  CDS (1)..(585)
atggctgaaatccgccgaaagctcgtcatcgtcggcgacggtgcctgtggcaaaacctgtctgttgattgtcttttccaagggaactttcccagaggtttacgtccccaccgttttcgaaaactatgttgccgacgtcgaggtcgatggcaaacatgttgagctggccctttgggatactgctggtcaggaggattacgaccgtcttcgtcctctgtcgtaccctgattcgcacgttattctgatttgctttgccatcgactcccccgattcccttgacaacgtccaggagaagtggatctccgaggtccttcacttctgccagggccttcctattattctcgttggctgcaagaaggatctccgttacgaccaaaaggtcacaaacgagctggctaagacgagccagaagcccgtcagccccgaagagggtgaggagatccgcaagaagattggtgcttacaagtacctcgaatgctctgccaaaaccaacgagggtgtccacgaggttttcgagcacgccactcgtgctgccctgctttcgcgcagtagccgcaccaagcacaagaagtgccgcatcctgtaa

SEQ ID NO: 305 - protein, 194 aa, Cordyceps militaris
MAEIRRKLVIVGDGACGKTCLLIVFSKGTFPEVYVPTVFENYVADVEVDGKHVELALWDTAGQEDYDRLRPLSYPDSHVILICFAIDSPDSLDNVQEKWISEVLHFCQGLPIILVGCKKDLRYDQKVTNELAKTSQKPVSPEEGEEIRKKIGAYKYLECSAKTNEGVHEVFEHATRAALLSRSSRTKHKKCRIL

SEQ ID NO: 306 - DNA, 603 bp, Cordyceps militaris
  CDS (1)..(603)
atggctgccgcgaaccctccaaatgtcatccgaagaaagctcgtcattgtcggtgacggtgcctgcggcaagacgagtctgctcagcgtctttacacttggcttcttcccgaccaactatatcccgaccgtctttgagaattacgtcaccgactgccgcgtggacggcaagtctgtccagctcgcactttgggataccgccggccaagaagactacgagcgactgcgccctctagcttacgctaaagcccatgttatcctcattggcttttccgtcgatactcccgattctcttgacaatgtcaagaacaaatggattacagaagttatggatctctgccccggcatccccataatcctcgtcggtctcaaaaaggacctacgcgaagaccctgtcgccatcgaggagatgcgcaaaaagtccttgcgcttcgtcaccacccacgacggcgagtctgtcgcccgcgaagttggcgccaagcgatatctcgagtgctccagcctcagtggcgagggtgtcgacgacgtcttcgaggccgccacccgcgccgccctgctgacctttgaaaatggcgagggcagcggctgctgcgtcgtcttgtaa

SEQ ID NO: 307 - protein, 200 aa, Cordyceps militaris
MAAANPPNVIRRKLVIVGDGACGKTSLLSVFTLGFFPTNYIPTVFENYVTDCRVDGKSVQLALWDTAGQEDYERLRPLAYAKAHVILIGFSVDTPDSLDNVKNKWITEVMDLCPGIPIILVGLKKDLREDPVAIEEMRKKSLRFVTTHDGESVAREVGAKRYLECSSLSGEGVDDVFEAATRAALLTFENGEGSGCCVVL

SEQ ID NO: 308 - DNA, 591 bp, Medicago truncatula
  CDS (1)..(591)
atgagtacagctagattcatcaaatgtgttactgttggagatggtgctgttggaaagacttgtatgcttatctcttacacaagcaatacattccctacggattatgtgcctactgtttttgataatttcagtgcaaatgttgtggttgatggcagcacagttaatcttggattatgggacactgctggacaagaggattataacaggcttaggccattgagctatagaggagcagatgtgtttttgttggccttttcactactcagcagagccagctatgagaatatatctaaaaagtggattcctgaactcagacattatgctccaactgtaccaattgtgcttgtgggaaccaaacttgatttgagggaagataggcagtatttgattgatcatccaggagctacagctattactactgcccagggtgaagagctgaagagggcaattggtgcagctgtgtacttagaatgcagctcaaagactcaacagaatgtgaaggctgtgtttgatgctgcaatcaaggttgttttgcagcctcctaagcaaaagaaaaaaagaaagaagaacagatcatgtattttcctttaa

SEQ ID NO: 309 - protein, 196 aa, Medicago truncatula
MSTARFIKCVTVGDGAVGKTCMLISYTSNTFPTDYVPTVFDNFSANVVVDGSTVNLGLWDTAGQEDYNRLRPLSYRGADVFLLAFSLLSRASYENISKKWIPELRHYAPTVPIVLVGTKLDLREDRQYLIDHPGATAITTAQGEELKRAIGAAVYLECSSKTQQNVKAVFDAAIKVVLQPPKQKKKRKKNRSCIFL

SEQ ID NO: 310 - DNA, 591 bp, Picea sitchensis
  CDS (1)..(591)
atgagtactgccagatttattaagtgcgtgactgtgggggatggtgctgtgggaaagacttgtatgcttatttcctacacaagcaacacattcccaacggactatgtaccaacagtgtttgataacttcagtgcaaatgtagtggtcgatggaagtacagtgaatcttggcctctgggacacagcagggcaagaggattacaacaggctcaggcccctgagttacagaggtgcagatgttttcctcttggctttctccttgatcagcaaggccagttatgaaaacatttccaaaaagtggattccagaattgagacactatgcaccatctgtgcctatcattttggtggggactaaattagatttacgagaagacaaacagttctttgctgatcatcccggagcagccccaatatcaacagctcaaggtgaagatttgaagaggcaaatcggggctgcagcatacattgagtgcagttctaaaacacaacagaatgttaaggctgtttttgatgccgcaatcaaagtggttcttcaaccaccaaggcaaaagaaacgcagaaagaagcaaagaacatgtttcattctttga

SEQ ID NO: 311 - protein, 196 aa, Picea sitchensis
MSTARFIKCVTVGDGAVGKTCMLISYTSNTFPTDYVPTVFDNFSANVVVDGSTVNLGLWDTAGQEDYNRLRPLSYRGADVFLLAFSLISKASYENISKKWIPELRHYAPSVPIILVGTKLDLREDKQFFADHPGAAPISTAQGEDLKRQIGAAAYIECSSKTQQNVKAVFDAAIKVVLQPPRQKKRRKKQRTCFIL

SEQ ID NO: 312 - DNA, 597 bp, Picea sitchensis
  CDS (1)..(597)
atgagtacttctagatttataaaatgtgtcacagttggagatggtgcagtgggcaagacctgcatgctcatttcgtataccagcaacactttccccactgattacgtgccgactgttttcgataacttcagtgcaaatgtggtggtggatggcacttcagtcaaccttggcctgtgggatacagcaggtcaagaggattacaatagattgagaccattgagctaccgtggagcagatgttttcattttagcattttcgcttatcagtagggctagctatgagaatgtgtccaaaaagtggattcctgagctgaggcattatgctcctggagttccaataatccttgttgggaccaaattagacctccgagaggacaaacaattctatgctgaccacccaggtgccttgcctgtaacaactgatcagggagaggagctgaggaagcagattggggctgctgtttatatagaatgcagttcaaaaactcagcagaatatcaaagctgttttcgatgcagcaatcaaggttgtcattcagccaccaaagcagaagaagaagaagaaaaggaagtctcacaagaactgttccattatgtaa

SEQ ID NO: 313 - protein, 198 aa, Picea sitchensis
MSTSRFIKCVTVGDGAVGKTCMLISYTSNTFPTDYVPTVFDNFSANVVVDGTSVNLGLWDTAGQEDYNRLRPLSYRGADVFILAFSLISRASYENVSKKWIPELRHYAPGVPIILVGTKLDLREDKQFYADHPGALPVTTDQGEELRKQIGAAVYIECSSKTQQNIKAVFDAAIKVVIQPPKQKKKKKRKSHKNCSIM

SEQ ID NO: 314 - DNA, 594 bp, Populus trichocarpa
  CDS (1)..(594)
atgagcgcgtccaggttcattaagtgcgtgactgttggcgacggcgccgttggcaaaacatgtatgcttatttcctacaccagcaatactttccctacggactatgtaccaactgtttttgacaacttcagtgcgaatgtggttgtggatggaaacactgtcaacttaggattatgggatacagctggtcaagaggattacaatagattaagacctttgagttatcgtggggcagacgtctttattcttgcattctctttaatcagcaaggccagctatgaaaacgttgccaaaaagtggattccagaactgaggcattatgctcccggggttccaattattctcgttggaacaaaacttgatcttcgagaagacaagcagttctttgttgaccatcctggtgcagtgccaattactactgctcagggggaggaactgaaaaaacttattggagctcctttctacattgaatgtagttcgaaaacacagcagaatgtgaagggggtttttgatgcggccataaaggtggtgctgcagcctccaaagcaaaagaagaagaagaaaaaggggcaaaaggcttgctccatattgtaa

SEQ ID NO: 315 - protein, 197 aa, Populus trichocarpa
MSASRFIKCVTVGDGAVGKTCMLISYTSNTFPTDYVPTVFDNFSANVVVDGNTVNLGLWDTAGQEDYNRLRPLSYRGADVFILAFSLISKASYENVAKKWIPELRHYAPGVPIILVGTKLDLREDKQFFVDHPGAVPITTAQGEELKKLIGAPFYIECSSKTQQNVKGVFDAAIKVVLQPPKQKKKKKKGQKACSIL

SEQ ID NO: 316 - DNA, 594 bp, Populus trichocarpa
  CDS (1)..(594)
atgagcacagctaggttcatcaagtgtgtcactgttggggatggagctgttggcaagacatgcatgctcatctcttacactagcaacaccttccctactgattatgtgcctacagtgtttgacaacttcagtgctaatgtggtggttgatggcagcacagttaaccttggattatgggacactgcaggacaggaggattataacaggttgaggcctctgagttatagaggtgctgatgtgttcttattggcgttttctctaatcagcaaagctagctatgagaacattgccaagaagtggatttctgaactaaggcattatgccccaactgtgccagtcgtgcttgtgggaaccaaacttgatttacgaaacgataagcaatatttgatagatcatcccggcgctacaccaatcacaactgctcagggggaggaactaaagaagatgattggtgctgctgtctacatagagtgcagctccaagactcagcagaatgtgaaagctgtctttgatgctgcaatcaaggttgttttgcagcctccgaggccaaagaaaaggagacagaagcgtaggccaccatgtgtgtttctctaa

SEQ ID NO: 317 - protein, 197 aa, Populus trichocarpa
MSTARFIKCVTVGDGAVGKTCMLISYTSNTFPTDYVPTVFDNFSANVVVDGSTVNLGLWDTAGQEDYNRLRPLSYRGADVFLLAFSLISKASYENIAKKWISELRHYAPTVPVVLVGTKLDLRNDKQYLIDHPGATPITTAQGEELKKMIGAAVYIECSSKTQQNVKAVFDAAIKVVLQPPRPKKRRQKRRPPCVFL

SEQ ID NO: 318 - DNA, 600 bp, Claviceps purpurea
  CDS (1)..(600)
atggctcaacccggcgtccagtccctcaagtgtgtcgtgaccggtgacggtgcggttggcaagacatgtcttctcatttcgtacacgaccaatgcctttcccggcgaatacattccgacagttttcgacaactactcggcaagtgtcatggttgatggaaagcccatcagcctgggtctgtgggataccgcaggccaggaagattacgatcgcttgcgacccttgtcatatcctcaaacagatgttttcctcatctgcttctccattgtttcacctccatcctttgacaacgtcaaggccaagtggcaccccgaaatcgaccatcatgcacccaacattcccatcatcttggtcggcaccaagctcgatttgcgagaggacgccgccacactggattcgttgaggcaaaagagaatggagcctgtatcatatgagcaagcactggcttgcgcacgagaaatcaaagcttgcaaatacttggaatgctctgctctcacccagcgcaacttgaagagcgtatttgatgaagccattcgtgctgtcttgaatcctcgttcacaaacatccaagagcaaaaagtcgaaatgttcaatcctgtaa

SEQ ID NO: 319 - protein, 199 aa, Claviceps purpurea
MAQPGVQSLKCVVTGDGAVGKTCLLISYTTNAFPGEYIPTVFDNYSASVMVDGKPISLGLWDTAGQEDYDRLRPLSYPQTDVFLICFSIVSPPSFDNVKAKWHPEIDHHAPNIPIILVGTKLDLREDAATLDSLRQKRMEPVSYEQALACAREIKACKYLECSALTQRNLKSVFDEAIRAVLNPRSQTSKSKKSKCSIL

SEQ ID NO: 320 - DNA, 600 bp, Colletotrichum gloeosporioides
  Colletotrichum gloeosporioides f
  CDS (1)..(600)
atggctcagccaggagaacagtcgctgaagtgtgtggtgacgggtgacggtgccgtcggaaagacatgtttgctcatttcctacacaacgaacgccttccccggcgagtacatccccactgtcttcgacaactactctgcgagtgtcatggtcgatggaaagccaattagcctgggactgtgggatactgccggtcaggaggattacgacagactgcgcccgctctcctacccccagaccgacgttttcctcatctgcttctccatcgtcagcccgccatcatttgacaacgtcaaggccaagtggtaccccgagatcgaccaccacgcgcccaacatccccatcatcctcgtcggcaccaagctggatctgagagaagaccccaacaccctcgagtctctccgccagaagcgcatggagcccgtgtcgtacgatcaagctctgatctgcgccaaggaaatcaaggcacataagtacctggagtgctctgccctgacgcagagaaatctcaagagtgttttcgacgaggctatccgtgctgtcctcaaccccaggcctgttcctcagcagaagaagaagtccaagtgcacgattttgtga

SEQ ID NO: 321 - protein, 199 aa, Colletotrichum gloeosporioides
  Colletotrichum gloeosporioides f
MAQPGEQSLKCVVTGDGAVGKTCLLISYTTNAFPGEYIPTVFDNYSASVMVDGKPISLGLWDTAGQEDYDRLRPLSYPQTDVFLICFSIVSPPSFDNVKAKWYPEIDHHAPNIPIILVGTKLDLREDPNTLESLRQKRMEPVSYDQALICAKEIKAHKYLECSALTQRNLKSVFDEAIRAVLNPRPVPQQKKKSKCTIL

SEQ ID NO: 322 - DNA, 594 bp, Eucalyptus gunnii
  CDS (1)..(594)
atgagcgcgtcgaggttcatcaagtgcgtcaccgtcggcgacggtgccgtcggcaaaacctgcctgttgatttcttataccagcaacactttccccacggactatgtgcccacggtgtttgacaattttagtgcaaatgtggtggttaatggaagtactgttaatctgggattgtgggatactgctggacaagaggattataacagattaagacctctaagttaccgtggagcagatgttttcatacttgctttctctctcataagcaaggccagttatgaaaacgtttcaaagaagtggattccagaattaaagcattatgcacctggtgtgccaataattctcgtgggaacaaagctggatttgcgggatgataagcagttctttatagaccatcctggtgcagtgcctattacgacccagcagggagaggaattgaggaagctgattggagctcctgcatacattgaatgcagttcgaaaacacaacagaatgtgaaggccgtctttgacgcggccataagggttgtgcttcaaccaccaaaacagaagaaaaagaagagcaaagcacaaaaagcctgctcaatattgtga

SEQ ID NO: 323 - protein, 197 aa, Eucalyptus gunnii
MSASRFIKCVTVGDGAVGKTCLLISYTSNTFPTDYVPTVFDNFSANVVVNGSTVNLGLWDTAGQEDYNRLRPLSYRGADVFILAFSLISKASYENVSKKWIPELKHYAPGVPIILVGTKLDLRDDKQFFIDHPGAVPITTQQGEELRKLIGAPAYIECSSKTQQNVKAVFDAAIRVVLQPPKQKKKKSKAQKACSIL

SEQ ID NO: 324 - DNA, 636 bp, Medicago truncatula
  CDS (1)..(636)
atggcttcaacagcttcaagattcatcaagtgcgtcacagttggagacggagctgtaggcaaaacctgcatgctcatttgctacaccagcaacaaattccccactgactatattcctacagtgtttgataattttagtgcaaatgtggttgtggaaggcattactgtcaatttaggtctctgggatacagctgggcaagaggattacaataggctgaggcctttgagctacagaggggcagatgtctttgtcttggctttttctttagttagtcgcgcaagttacgaaaatgtgttcaagaagtggatccctgaactccagcattttgcccctggcgtccctgttgtacttgttggaaccaaattggatctccgagaagacagacattatttggctgatcatcctggcatggtgccggtgactactgagcaaggtgaggaactccgtaagcagattggagctacatattatattgagtgcagctcaaaaactcagcagaatgtgaagggagtttttgatgctgcgattaggatggtcatcaagcctccacaaaagcaacacgagaaaaggaaaaaagctcgtcgaggctgtttcctaaatgtcctctgtggaaggagcatcgttcgtcataaatga

SEQ ID NO: 325 - protein, 211 aa, Medicago truncatula
MASTASRFIKCVTVGDGAVGKTCMLICYTSNKFPTDYIPTVFDNFSANVVVEGITVNLGLWDTAGQEDYNRLRPLSYRGADVFVLAFSLVSRASYENVFKKWIPELQHFAPGVPVVLVGTKLDLREDRHYLADHPGMVPVTTEQGEELRKQIGATYYIECSSKTQQNVKGVFDAAIRMVIKPPQKQHEKRKKARRGCFLNVLCGRSIVRHK

SEQ ID NO: 326 - DNA, 603 bp, Neurospora crassa
  CDS (1)..(603)
atggctgctatcggaggcgtgcagtcgatcaagtgcgtcgtcactggtgacggtgctgtaggaaagacatgtcttctcatctcatacacaacaaatgccttccccggcgaatacattcccacagtcttcgataattactcggcgagtgttatggtcgatggcaagcccgtgagcttgggtctctgggatactgctggacaggaggattacgacagactgcgcccgctttcgtacccccagaccgacgtcttcctcatctgcttttcgctcgtcagccctccgtcgttcgacaacgtcaagtccaagtggcaccccgagatccagcatcacgcccccggcatccccatcatcttggtgggcaccaagctcgatttgcgcgaggaccccgataccattcagagcctgagccagaaacgcatggctccgataacgttcgagatgggtgtcaactgcgccaaggagatcggcgcgaggaagtacctcgagtgctctgcccttacccaaaggaatctcaagtctgttttcgacgaggccatcagagctgtgctctaccgcgtcgatacgacccaagaaaagaagaagtccaagtgcactatcctctaa

SEQ ID NO: 327 - protein, 200 aa, Neurospora crassa
MAAIGGVQSIKCVVTGDGAVGKTCLLISYTTNAFPGEYIPTVFDNYSASVMVDGKPVSLGLWDTAGQEDYDRLRPLSYPQTDVFLICFSLVSPPSFDNVKSKWHPEIQHHAPGIPIILVGTKLDLREDPDTIQSLSQKRMAPITFEMGVNCAKEIGARKYLECSALTQRNLKSVFDEAIRAVLYRVDTTQEKKKSKCTIL

SEQ ID NO: 328 - DNA, 603 bp, Neurospora crassa
  CDS (1)..(603)
atggcatcaggcagccctcagaatgtcatccgcaggaaactcgtcattatcggcgacggtgcttgcggaaaaaccagtctactgagcgtcttcactttgggttttttcccagccacatatatccccaccgtgttcgagaattacgttaccgactgccgagtagatggcaagtcggttcaactagcgctatgggacacagccggacaagaagactatgagcgattacgaccactagcatactcaaaggcgcatgtcattctaatagggttttctgtcgacacgccagattctttggacaacgttaaacacaagtgggttactgaggccaatgaaagatgtcccaatgttcccatcattttggtgggtctcaagaaggatctcaggggagatcctgttgccatcgaagaaatgcgaaagcgatcccaacgattcgtgatggaggacgaaggccagaggatagcaaaggagattggcgctcgaaagtatctcgaatgttccagtcttaccggagaaggtgttgacgacgtattcgaggcagccacgcgagcggcgctgctaacgtttgagaagaaggaaggaagcgggtgctgtgtgattctatga

SEQ ID NO: 329 - protein, 200 aa, Neurospora crassa
MASGSPQNVIRRKLVIIGDGACGKTSLLSVFTLGFFPATYIPTVFENYVTDCRVDGKSVQLALWDTAGQEDYERLRPLAYSKAHVILIGFSVDTPDSLDNVKHKWVTEANERCPNVPIILVGLKKDLRGDPVAIEEMRKRSQRFVMEDEGQRIAKEIGARKYLECSSLTGEGVDDVFEAATRAALLTFEKKEGSGCCVIL

SEQ ID NO: 330 - DNA, 810 bp, Arabidopsis thaliana
  CDS (1)..(810)
atggcagatgcaaacgaagtagtggaatgggccaacaatttaaagtgggataaatatgctggaaataaagaaattgttgatggattggccgctttgagacaaaaaatcacagctttggacggcgctgaaggaggctctggtggcaatcaaagagttaaattagtagttgtcggtgatggtgccgtcggcaaaacatctctgttgatttcattcgctgaaaacaaattccctgaggattacgtccctacagtcttcgaaaactacacttctaaaatcactcgcgacgatggtacacttgttctgttgcatttgtgggatacagccggtcaagaggactacgaccgattgagacctttgagttatcctggcgctgatgtcatcctgctctgtttctccaccgtcactgcctcgtcattcgcctccattaaagaaaagtggtaccccgaagtcaaccactacgtgcccgatgctccttatattttggtcggcaccaagctcgacttgcgtgaggctggtctgcccgatccctccactggtgagtcagatcccgtcacccccgagaaggctgaggagatgcgaaagcaaatcaaagcgttgaagtatattgaagtctctgccaagacacgaaagaacttgcagactctgttttcagaagccgtggacattgtcttggctgaacgacgcgcacacgagcctcccaagcccaccgctgcttcatcgacgaacggcactaacggcactaagactgagcacactcctcgcgaagagcccatccgaaagaagaaggagcgtcgctgcttgttgatgtaa

SEQ ID NO: 331 - protein, 269 aa, Arabidopsis thaliana
MADANEVVEWANNLKWDKYAGNKEIVDGLAALRQKITALDGAEGGSGGNQRVKLVVVGDGAVGKTSLLISFAENKFPEDYVPTVFENYTSKITRDDGTLVLLHLWDTAGQEDYDRLRPLSYPGADVILLCFSTVTASSFASIKEKWYPEVNHYVPDAPYILVGTKLDLREAGLPDPSTGESDPVTPEKAEEMRKQIKALKYIEVSAKTRKNLQTLFSEAVDIVLAERRAHEPPKPTAASSTNGTNGTKTEHTPREEPIRKKKERRCLLM

SEQ ID NO: 332 - DNA, 594 bp, Nicotiana tabacum
  CDS (1)..(594)
atgagtgctccaaggtttatcaagtgtgttacggttggtgatggtgccgttgggaaaacttgtcttttgatttcatacaccagcaatactttccctatggattatgtgcccactgtgtttgacaatttcagtgcaaatgttgttgtcaatgggagcactgtcaacctagggttgtgggatactgccggacaggaggattacaataggttaagacctctgagttaccgtggagccgatgtcttcattttggcattctctctcattagtaaagccagctatgagaatgtatccaagaagtggattcctgagttgaagcactatgctcctggtgtcccaatagttcttgttggaacaaaacttgatcttcgggatgataagcaattcttcatagaccaccccggtgctgtgccaattactactgctcagggtgaggagctaaggaaaactataggtgcacctgcttacatcgaatgtagttcaaaaacacaacagaatgtgaaagcagtctttgatgcagccattaaggtcgtcctccagccgcctaaaacaaagaaaaagaaggggaaatcacaaaagtcctgctcgatattgtga

SEQ ID NO: 333 - protein, 197 aa, Nicotiana tabacum
MSAPRFIKCVTVGDGAVGKTCLLISYTSNTFPMDYVPTVFDNFSANVVVNGSTVNLGLWDTAGQEDYNRLRPLSYRGADVFILAFSLISKASYENVSKKWIPELKHYAPGVPIVLVGTKLDLRDDKQFFIDHPGAVPITTAQGEELRKTIGAPAYIECSSKTQQNVKAVFDAAIKVVLQPPKTKKKKGKSQKSCSIL

SEQ ID NO: 334 - DNA, 597 bp, Brassica campestris
  CDS (1)..(597)
atgagtgcttcgaggtttatcaagtgtgtcaccgtcggcaacggcgctgtcggaaagacttgtctgctcatttcctacactagcaacactttccccacggactatgtgccaactgtgttcgataatttaagcgccaatgtgattgtggatgggaacactatcaacttgggattgtgggatactgcaggacaagaggactacaatagactaagaccattgagctatcgcggcgcagatgtcttcttacttgccttctctctcgtcagcaaagctagctatgaaaatgtttctaaaaagtgggtgcctgaactgagacattatgcacctggtgttcccatcatcctcgttggaaccaagcttgatcttcgagatgacaagcaattctttgttgagcaccctggtgctgttcctatctctactgctcagggtgaagaactgaagaagctgattggggcacctgcttatatcgaatgcagtgcaaaaacacaacagaatgtaaaagcggtgtttgatgcggctatcaaggtagttctccagccacccaaaaacaagaagaggaagaagagaaagtctcagaaaggttgttctatattgtga

SEQ ID NO: 335 - protein, 198 aa, Brassica campestris
MSASRFIKCVTVGNGAVGKTCLLISYTSNTFPTDYVPTVFDNLSANVIVDGNTINLGLWDTAGQEDYNRLRPLSYRGADVFLLAFSLVSKASYENVSKKWVPELRHYAPGVPIILVGTKLDLRDDKQFFVEHPGAVPISTAQGEELKKLIGAPAYIECSAKTQQNVKAVFDAAIKVVLQPPKNKKRKKRKSQKGCSIL

SEQ ID NO: 336 - DNA, 576 bp, Ciona savignyi
  CDS (1)..(576)
atgcaaactataaagtgtgtagttgttggagatggtgctgtgggtaaaacctgtttgctaatatcctataccacaaacaagtttccacaagaatatgttccaacggtcttcgacaactatgccgtcactgttatgatcggaggggaaccatacacattgggtttatttgatactgcaggccaggaagattatgacaggttaaggcctctcagttatccacaaactgatgtgtttttggtttgtttttctgttgtatcaccgtcatcatatgaaaatataaaagaaaagtgggtcccggaaatcacccatcattgtccaaagacgccatttttattggttggaacccaggttgatttgcgagatgatgctgcaacaattgaaaaactttcaaagaacaaacagaaagctataactccagatttgggtgataaactggcaagagagttaaaagcagtaaaatatgtcgagtgctctgcccttactcaaaaaggattaaagaatgtatttgatgaagctattttagctgctttagagccaccggagcctaaaagacgtcgccgatgtcaaattttgtga

SEQ ID NO: 337 - protein, 191 aa, Ciona savignyi
MQTIKCVVVGDGAVGKTCLLISYTTNKFPQEYVPTVFDNYAVTVMIGGEPYTLGLFDTAGQEDYDRLRPLSYPQTDVFLVCFSVVSPSSYENIKEKWVPEITHHCPKTPFLLVGTQVDLRDDAATIEKLSKNKQKAITPDLGDKLARELKAVKYVECSALTQKGLKNVFDEAILAALEPPEPKRRRRCQIL

SEQ ID NO: 338 - DNA, 597 bp, Picea mariana
  CDS (1)..(597)
atgagtacctgtaaattcataaaatgtgtgactgtcggggacggagctgtaggcaagacctgtatgctcatctcgtatacgagcaatacatttccaactgactatgtaccaaccgtttttgataactttagtgcaaatgttgtggtggatggcaacacagtgaaccttggcctttgggatacagcaggtcaagaggattacaatagattaagacctttgagctacaggggagcagatgtttttattctggcattttctcttattagcaaggcaagctatgagaatattatgaaaaagtggcttcttgagctgagacattttgcacctggtgttccaatagttctcgttggaactaaactagatcttcgggatgacaaacaattttttactgatcaccccagtgctgtgcctataacaactgctcaaggggaagagttgaagaagcaaattggtgctgctgcatacatagagtgcagttcaaaaacgcaacagaatatcaaagcagtctttgattcagccatcagggttgttcttcaacctccaaaggtgaagaggaaaaagaaaagaaaatctcacaagacttgttcaatcctgtga

SEQ ID NO: 339 - protein, 198 aa, Picea mariana
MSTCKFIKCVTVGDGAVGKTCMLISYTSNTFPTDYVPTVFDNFSANVVVDGNTVNLGLWDTAGQEDYNRLRPLSYRGADVFILAFSLISKASYENIMKKWLLELRHFAPGVPIVLVGTKLDLRDDKQFFTDHPSAVPITTAQGEELKKQIGAAAYIECSSKTQQNIKAVFDSAIRVVLQPPKVKRKKKRKSHKTCSIL

SEQ ID NO: 340 - DNA, 579 bp, Hemicentrotus pulcherrimus
  CDS (1)..(579)
atggctgctataaggaaaaagttggttatcgtaggagatggtgcttgtgggaagacgtgtctgctcatagtatttagcaaagaccagttccctgaagtctatgtcccaacagtttttgagaactatgtagctgatatagaagtagacggtaaacaggttgagttggcattatgggatacagcaggtcaggaagactacgacagactgagaccgctctcatatccagacacagacgttatactcatgtgcttttcaatcgacaacccagacagtttagaaaccatcccagaaaaatggacaccagaggtgaagcacttttgccctaatgtacctgtcatcttggtcggcaacaagaaagatcttcgaaatgacgatgccacaaaacgggaactgagtaagatgaagcaggaaccggtgaaatataatgatgcccagaccatgtcagataagatcaacgcctacaaatacctagaatgctcagccaagtctaacgatggtgtcagggaagtgtttgagacagcaaccagagcagcactacaagttaaaaagaagaagtcatcaaaatgcagcctcttgtaa

SEQ ID NO: 341 - protein, 192 aa, Hemicentrotus pulcherrimus
MAAIRKKLVIVGDGACGKTCLLIVFSKDQFPEVYVPTVFENYVADIEVDGKQVELALWDTAGQEDYDRLRPLSYPDTDVILMCFSIDNPDSLETIPEKWTPEVKHFCPNVPVILVGNKKDLRNDDATKRELSKMKQEPVKYNDAQTMSDKINAYKYLECSAKSNDGVREVFETATRAALQVKKKKSSKCSLL

SEQ ID NO: 342 - DNA, 570 bp, Ostreococcus tauri
  CDS (1)..(570)
atggcgatcgatcacatgtccgtgaagtgcgtcgtcgtaggcgacggagctgtggggaagacatcgatgctgatgtgctacgcgacgaacacgttcccgacggatcacatgccgacgattttcgacaactacagcaaaaacgtgacgctgcaggacggacgaacggtgagcctcgggttgtgggacaccgcgggtcaggatgaatatgcggcgtttagaccgctgagttacgacgcggcggatgcgatgctgttggcgttctcatgcgactcgcgggagagctacgagagcgtggagacgaagtgggtacaggagctacgagccaagtcgcctgggacgccgatcgtgctcgtgtgcacaaagattgatctcagggacagcgcgaaaggggttattggacgggtggagggggaggctctgagcgagcgcatcaaggcgacggcgtacgtggagtgtagtgcgttaacgcagagcggcttacagacggtgttcgacacggttattgatgtccgtttgcgccccgagctgttcgcgaagaaagcccagggtggatgttgttcaattcagtga

SEQ ID NO: 343 - protein, 189 aa, Ostreococcus tauri
MAIDHMSVKCVVVGDGAVGKTSMLMCYATNTFPTDHMPTIFDNYSKNVTLQDGRTVSLGLWDTAGQDEYAAFRPLSYDAADAMLLAFSCDSRESYESVETKWVQELRAKSPGTPIVLVCTKIDLRDSAKGVIGRVEGEALSERIKATAYVECSALTQSGLQTVFDTVIDVRLRPELFAKKAQGGCCSIQ

SEQ ID NO: 344 - DNA, 594 bp, Petunia integrifolia
  Petunia integrifolia subsp
  CDS (1)..(594)
atgagtgcttccaggtttattaaatgtgttactgtgggtgatggtgctgttggcaagacttgtcttttgatttcatacaccagcaataccttccccacggattatgtgccaactgtgttcgacaatttcagtgcaaatgtggttgtcaatggggcaaccgtcaacctagggttgtgggatactgctggacaggaggattacaataggttaagacctctgagttaccgtggagctgatgttttcattttggcattctctctcatcagtaaagccagctatgaaaatgtttccaagaagtggattcctgagttgaagcattacgcccctggtgtccctattgtgcttgttggaacaaaacttgatcttcgagatgataagcaattcttcatagaccatcctggtgccgtgccaattactactgctcagggtgaagagctgaggaaaactattaatgcaccttcctacattgaatgtagttcaaaaacccaggaaaatgtaaaagcagtgtttgatgctgccataaaagttgtgctccagccacccaagcagaagaaaaagaaaggaaaatctcaaagggcctgctcaattttgtga

SEQ ID NO: 345 - protein, 197 aa, Petunia integrifolia
  Petunia integrifolia subsp
MSASRFIKCVTVGDGAVGKTCLLISYTSNTFPTDYVPTVFDNFSANVVVNGATVNLGLWDTAGQEDYNRLRPLSYRGADVFILAFSLISKASYENVSKKWIPELKHYAPGVPIVLVGTKLDLRDDKQFFIDHPGAVPITTAQGEELRKTINAPSYIECSSKTQENVKAVFDAAIKVVLQPPKQKKKKGKSQRACSIL

SEQ ID NO: 346 - DNA, 636 bp, Gossypium hirsutum
  CDS (1)..(636)
atggcttcaagcgcttcaagatttatcaaatgtgtaacagttggagatggagctgttggcaagacttgcatgcttatttgctatacaagtaacaagttcccgacagattacataccaacagtttttgataacttcagtgccaacgttgtagttgaaggcacaactgtgaacttaggtctttgggacacggctggacaagaggattacaacagactaaggccattgagctacagaggtgcagatgtctttgtcctagctttctcattagttagtcgagcaagctatgagaacatactaaaaaagtggattcctgaacttcagcattatgccccaggcgtccctgtggttctggttggcaccaaattggatcttcgtgaggataaacattatctggctgatcatcctggcttgctgccggttagcactgcacagggtgaggagctctgcaaacagataggtgctgcttattacattgagtgcagctcaaaaactcagcagaacgtgaaagcagtttttgatgctgcaatcaaagttgtgatcaagccaccccaaaaacagaaggagaagaagaaaaagccaagtcgaggatgtctaataaatgtcttctgcgggaggaactttgtgcctgctaaatga

SEQ ID NO: 347 - protein, 211 aa, Gossypium hirsutum
MASSASRFIKCVTVGDGAVGKTCMLICYTSNKFPTDYIPTVFDNFSANVVVEGTTVNLGLWDTAGQEDYNRLRPLSYRGADVFVLAFSLVSRASYENILKKWIPELQHYAPGVPVVLVGTKLDLREDKHYLADHPGLLPVSTAQGEELCKQIGAAYYIECSSKTQQNVKAVFDAAIKVVIKPPQKQKEKKKKPSRGCLINVFCGRNFVPAK

SEQ ID NO: 348 - DNA, 582 bp, Halocynthia roretzi
  CDS (1)..(582)
atggcagcgatccgtaaaaaacttgtcatcgttggtgatggtgcttgcggtaaaacttgcttgttgatcgtcttcagcaaagaccaattcccagaagtttatgtacctactgtgtttgaaaactatgttgccgatatcgaagtagatggaaaaacggttgaactagccttgtgggacactgctgggcaggaagactatgatagattgcgaccactctcttatcctgacacagatgtcattctgatgtgtttttcaatcgacagcccagattccctggaaaacattcctgaaaaatggacaccagaggtgaaacacttttgtccaaacgttcccattattcttgtcggaaacaaaaaagatctccgaggagatgaaggcactataaaagaactttctaagatgaaacaagaaccggttaaacaggaggagggtcgtgctatggctgagaaaattggagcttttggatacctggaatgctcttcaaaaacaaaggaaggagtccgtgaagttttcgaaaacgcgactcgagccgcacttcaaactagaaagcataagaaaaagggaggatgtgatgttctttaa

SEQ ID NO: 349 - protein, 193 aa, Halocynthia roretzi
MAAIRKKLVIVGDGACGKTCLLIVFSKDQFPEVYVPTVFENYVADIEVDGKTVELALWDTAGQEDYDRLRPLSYPDTDVILMCFSIDSPDSLENIPEKWTPEVKHFCPNVPIILVGNKKDLRGDEGTIKELSKMKQEPVKQEEGRAMAEKIGAFGYLECSSKTKEGVREVFENATRAALQTRKHKKKGGCDVL

SEQ ID NO: 350 - DNA, 597 bp, Solanum chacoense
  CDS (1)..(597)
atgagtgcttctaggtttataaagtgtgttactgtgggcgatggagctgtgggtaaaacttgtcttctcatttcgtataccagcaacacttttcccactgattatgtcccaactgtatttgacaattttagtgcaaatgtggtcgtcgatggaagcactgttaatctggggctctgggatactgcaggtcaggaggattacaatagattaagacctttgagctatcgtggggcagatgtatttatactggcattttctctcattagcaaggcgagctatgaaaatgtctccaaaaagtggattcctgaattgaggcattatgctcctggagttccaattattcttgttggaacaaagctagatctccgagaggataaacaattctttgtggaccatccaggtgctgttccacttagcacagctcagggtgaggagctgagaaagtcgattggtgctgctgcttacattgaatgtagtgcaaaaacacaacagaacattaaggctgtttttgatgctgccattaaggtggtcctacaaccaccccagcaaaagaagaagaagaagagaaagggtcagaaagcctgctctatcttgtga

SEQ ID NO: 351 - protein, 198 aa, Solanum chacoense
MSASRFIKCVTVGDGAVGKTCLLISYTSNTFPTDYVPTVFDNFSANVVVDGSTVNLGLWDTAGQEDYNRLRPLSYRGADVFILAFSLISKASYENVSKKWIPELRHYAPGVPIILVGTKLDLREDKQFFVDHPGAVPLSTAQGEELRKSIGAAAYIECSAKTQQNIKAVFDAAIKVVLQPPQQKKKKKRKGQKACSIL

SEQ ID NO: 352 - DNA, 588 bp, Fusarium oxysporum
  CDS (1)..(588)
atggctgagatccgccgaaagctcgtcattgtcggcgatggtgcttgtggtaaaacctgtttgttgattgttttctccaagggcactttccctgaggtctacgtccccaccgttttcgagaactacgtcgccgatgtcgaggttgatggcaagcacgtcgagctcgcactatgggatactgctggtcaggaggattacgaccgtcttcgacccctgtcttaccccgactcccacgttatcctgatctgcttcgctgttgactctcccgactctcttgacaacgtccaggagaagtggatctctgaggttctgcacttctgccaaggtctccctatcattcttgtcggctgcaagaaggatttgcgatacgaccagaagaccatcgaggagctccgaaagaccagtcagaagcctgtctcccccgaggagggtgaggaggttcgcaagaagatcgctgcctacaagtaccttgagtgctcagccaagaccaacgagggtgtccgcgaggtgttcgagcacgctactcgcgctgctctgctgtcgcgaagcaccagtggtagcaagcacaagaagtgccttgttctgtaa

SEQ ID NO: 353 - protein, 195 aa, Fusarium oxysporum
MAEIRRKLVIVGDGACGKTCLLIVFSKGTFPEVYVPTVFENYVADVEVDGKHVELALWDTAGQEDYDRLRPLSYPDSHVILICFAVDSPDSLDNVQEKWISEVLHFCQGLPIILVGCKKDLRYDQKTIEELRKTSQKPVSPEEGEEVRKKIAAYKYLECSAKTNEGVREVFEHATRAALLSRSTSGSKHKKCLVL

SEQ ID NO: 354 - DNA, 579 bp, Lytechinus variegatus
  CDS (1)..(579)
atggctgctataaggaaaaagctggtcatcgttggagatggtgcttgcggaaagacatgtttgctgatagtgttcagcaaagatcagttcccagaagtttacgtcccaacagtatttgagaactatgtagctgatatagaagtagatggtaaacaggttgagttagcattatgggatactgcaggtcaggaagactacgacagactgagaccgctctcttatccagacacagatgttatactcatgtgcttttcaattgacaacccggacagtttagagaatatcccagaaaaatggacacctgaggtgaagcatttttgccctaatgtacctgttatcctggtcggaaacaagaaagatctccgaatggatgaaaacactaaacgagaactgatgaagatgaaacaggaaccggtgagaacagctgatgcccagtcgatgtcagacaagatcagtgcttacaaatacctagaatgctcagccaagtctaacgatggtgtcagggaagtgtttgagacagctaccagggcagcactacaagtcaaaaagaagaataaatcaaaatgcaatctcttgtaa

SEQ ID NO: 355 - protein, 192 aa, Lytechinus variegatus
MAAIRKKLVIVGDGACGKTCLLIVFSKDQFPEVYVPTVFENYVADIEVDGKQVELALWDTAGQEDYDRLRPLSYPDTDVILMCFSIDNPDSLENIPEKWTPEVKHFCPNVPVILVGNKKDLRMDENTKRELMKMKQEPVRTADAQSMSDKISAYKYLECSAKSNDGVREVFETATRAALQVKKKNKSKCNLL

SEQ ID NO: 356 - DNA, 588 bp, Claviceps purpurea
  CDS (1)..(588)
atggcggtcgtcgcaaccatcaaatgtgttgtagtcggcgacggtgcggtcggcaagacgtgcttacttatcagctataccaccaataaattcccctcggaatacgtcccgaccgtattcgacaactatgccgtcacggtaatgatcggcgacgagccgtatacccttggcttattcgacacagccggtcaagaagattacgacagactgcgtccgctctcgtatccgcaaaccgatgtctttctcgtctgcttcagcgttacgtcacctgcatcgtttgagaacgtgcgtgagaagtggttccctgaggttcatcaccactgcccaggagtgccctgcctcattgttggtacacaagtcgatttgcgagatgatccgagtgtgcgagagaagctggcgaagcagaagatggcaccggttaagaaggaagaaggcgataagatggcgcgagagcttggcgccgttaagtacgtcgagtgcagtgcacttacgcaattccggttaaaggatgtctttgacgaggcaatcgtcgctgccttggagccgccgatgcccaagaagaagtctctcaagtgtctgatcctataa

SEQ ID NO: 357 - protein, 195 aa, Claviceps purpurea
MAVVATIKCVVVGDGAVGKTCLLISYTTNKFPSEYVPTVFDNYAVTVMIGDEPYTLGLFDTAGQEDYDRLRPLSYPQTDVFLVCFSVTSPASFENVREKWFPEVHHHCPGVPCLIVGTQVDLRDDPSVREKLAKQKMAPVKKEEGDKMARELGAVKYVECSALTQFRLKDVFDEAIVAALEPPMPKKKSLKCLIL

SEQ ID NO: 358 - DNA, 633 bp, Candida albicans
  CDS (1)..(633): transl_table=12
atgcctctttgtggtggtggtcaaaaaacaattcaaagaaaaattgtcattcttggagatggtgcgtgtggtaaaacatcgcttttgaatgtcttcactagaggatattttccccaagtctatgagcctacagtgtttgaaaattacgtgcatgatatatttattgatggtcaatccgttcaattgtcattatgggatacagcaggacaagaagagtttgataggttgcgatctttatcgtattccgatacccattgtattatgttgtgtttttctgttgattcaccagactcgcttgaaaatgttcaaagtaaatgggtaggggaaattgcagatcattgtgaaggggtaaagttggtattggtggcattgaagtgtgatttaagaaataatgaggatatagaagatcagcaacaatcaaatccttactcttcacaaaagagattgattacatacgaagaagggttagctgtggctaagaaagttggggccttacgatacttggagtgctctgctaagaagaacaagggtgttaacgaagcattttctgaagctgcaagatgtgcccttaatgccaaacctaaaggtgccaatgacaatgaaccacaaaagaaaggttgtgtagttatgtaa

SEQ ID NO: 359 - protein, 210 aa, Candida albicans
MPLCGGGQKTIQRKIVILGDGACGKTSLLNVFTRGYFPQVYEPTVFENYVHDIFIDGQSVQLSLWDTAGQEEFDRLRSLSYSDTHCIMLCFSVDSPDSLENVQSKWVGEIADHCEGVKLVLVALKCDLRNNEDIEDQQQSNPYSSQKRLITYEEGLAVAKKVGALRYLECSAKKNKGVNEAFSEAARCALNAKPKGANDNEPQKKGCVVM

SEQ ID NO: 360 - DNA, 594 bp, Capsicum annuum
  CDS (1)..(594)
atgagtgcttccaggtttattaagtgtgttacagtgggtgatggtgctgttggcaagacttgtttattgatttcttacacaagcaatactttccctacggactatgtgcccaccgtgttcgacaatttcagcgcaaatgtggttgtcaatggagccactgtcaacctagggttgtgggatactgctggacaggaggactacaataggttaagacccctgagttaccgtggggccgatgttttcattttggcattctctctcattagtaaagccagctatgagaatgtctccaagaagtggattcctgagttgaagcactatgctcctggtgtcccaatagttcttgttggaacaaaacttgatcttcgggatgacaagcaattcttcgtagaccatcctggtgctgtgccaattgctactgctcagggcgaggagctaaggaaaacaatcggtgcaccatcttacgttgaatgtagttcaaaaacacagcagaatgtgaaagcagtctttgatgctgccattaagggtcgtcctccagcctcccaagacgaagaaaagaaggggaaatctcaaaaggcctgctcgatattgtga

SEQ ID NO: 361 - protein, 197 aa, Capsicum annuum
MSASRFIKCVTVGDGAVGKTCLLISYTSNTFPTDYVPTVFDNFSANVVVNGATVNLGLWDTAGQEDYNRLRPLSYRGADVFILAFSLISKASYENVSKKWIPELKHYAPGVPIVLVGTKLDLRDDKQFFVDHPGAVPIATAQGEELRKTIGAPSYVECSSKTQQNVKAVFDAAIKGRPPASQDEEKKGKSQKACSIL

SEQ ID NO: 362 - DNA, 579 bp, Medicago varia
  CDS (1)..(579)
atgcagagcatcaagctcgttgtcgtcggtgacggtgccgtcggcaagacctgcctgctcatcgcctacacctccaactccttccctcaggagtatgtgcccaccgtgtttgacaactactctgccaacgtcatggtcgatggtcgcatggtttccctcggtctttgggacacggccggccaggaggattacgaccgtctccgccccctgtcttaccctggcaccgacgtgttcctcctctgcttctccgtgatctcccccacctctttctcgaacgtgaagagcaagtggtggcctgaggtctctcaccactgccccaacgccaagatgatcctcgtgggcaccaagatggatctccgcgacgaccgtgacaccctcgacggtctcaagcgcaagggcctctcccccatctctcagactgatggtgagggcctcgcccgcgatatcggcgccgtcgcctacatggagtgctctgccctcacccaggctggcctcaagcaggtgttcgacgaggccatcaaggccgtggtcgtcaaaaaaaccccatccccgcaagaaaaaaattgcaccctcttctaa

SEQ ID NO: 363 - protein, 192 aa, Medicago varia
MQSIKLVVVGDGAVGKTCLLIAYTSNSFPQEYVPTVFDNYSANVMVDGRMVSLGLWDTAGQEDYDRLRPLSYPGTDVFLLCFSVISPTSFSNVKSKWWPEVSHHCPNAKMILVGTKMDLRDDRDTLDGLKRKGLSPISQTDGEGLARDIGAVAYMECSALTQAGLKQVFDEAIKAVVVKKTPSPQEKNCTLF

SEQ ID NO: 364 - DNA, 594 bp, Medicago varia
  CDS (1)..(594)
atgagtggttccaggttcatcaagtgtgtcactgttggtgatggtgccgttggaaagacttgtttgcttatctcttacaccagtaacactttccctacggactatgtgccgactgtctttgacaatttcagtgcaaatgtagttgtggatgggagcactataaatctcgggttgtgggatactgctggccaagaagattacaatagattaagacccttaagctatcgtggagcagatgtttttctgcttgctttttctctcataagcaaggccagctatgaaaatattgccaaaaaatggattcctgagttgaggcattatgctcctggtgttccaattattctcgttggaacaaaacttgatcttcgggatgatagccagttctttcaagaccatcctggtgcagcaccaataaccacagcacagggtgaggaactgaaaaaacttatcggtgctccaatttacattgaatgttattccaaaacacaaaagaatgtgaaggctgttttcgattcggccatcaaagtagttctacaaccgccaaagcaaaagaaaacaaagagaaaggggcaaaaagcatgttccattttgtga

SEQ ID NO: 365 - protein, 197 aa, Medicago varia
MSGSRFIKCVTVGDGAVGKTCLLISYTSNTFPTDYVPTVFDNFSANVVVDGSTINLGLWDTAGQEDYNRLRPLSYRGADVFLLAFSLISKASYENIAKKWIPELRHYAPGVPIILVGTKLDLRDDSQFFQDHPGAAPITTAQGEELKKLIGAPIYIECYSKTQKNVKAVFDSAIKVVLQPPKQKKTKRKGQKACSIL

SEQ ID NO: 366 - DNA, 594 bp, Medicago varia
  CDS (1)..(594)
atgagtgcttctaggtttattaaatgtgttactgttggtgatggagctgttggaaaaacttgtttgttgatttcttacaccagcaatactttccccacggattatgtgccgacagtttttgacaatttcagtgcgaatgtggttgttaatggaagtattgtgaatctgggtttgtgggatactgctgggcaagaggattataacagattaagacctttgagttaccgtggtgccgatgttttcatattggctttctctctcataagcaaagccagttatgaaaatgtctccaaaaagtggattccagagttgaagcattatgcacctggtgtccccataattctggttggaacaaagcttgaccttcgggatgatcagcagttctgcatagaccatcctggtgccgttcccattaccacagctcagggagaagagctgaggaagctgattaatgcaccagcttacattgaatgcagttcaaaatcacaggagaacgtgaaggcggtgtttgacgcagccataagagttgtccttcaaccaccaaagcagaagaaaaagaagaataaagcacaaaaggcctgttcaatattgtaa

SEQ ID NO: 367 - protein, 197 aa, Medicago varia
MSASRFIKCVTVGDGAVGKTCLLISYTSNTFPTDYVPTVFDNFSANVVVNGSIVNLGLWDTAGQEDYNRLRPLSYRGADVFILAFSLISKASYENVSKKWIPELKHYAPGVPIILVGTKLDLRDDQQFCIDHPGAVPITTAQGEELRKLINAPAYIECSSKSQENVKAVFDAAIRVVLQPPKQKKKKNKAQKACSIL

SEQ ID NO: 368 - DNA, 594 bp, Medicago varia
  CDS (1)..(594)
atgagcgcttctaggttcatcaagtgtgttactgttggggatggagctgttggtaaaacttgtttgttgatttcatacaccagcaataccttccccactgattatgtgccaactgtcttcgacaatttcagtgcaaatgtggttgtgaatggaagcactgtgaatctgggtttatgggacactgcaggacaagaggattataacagattaagacctttgagttatcgtggtgctgatgttttcattctcgctttctcactcataagcaaggccagttatgaaaatgtttctaaaaagtggattcgagagttgaagcattatgcacctggtgttcccattattctggttggcacaaagcttgaccttcgggatgacaagcagttctttgtcgaccatcctggtgctgttcccattaccaccgctcagggagaagagctcaggaagctgatcaatgcacctgcttatattgaatgcagttcaaaatcacagcagaacgtcaaagcagtctttgatgcagccataagagttgtccttcaaccaccaaagcaaaagaaaaagaagagtaaagctcaaaaggcctgttcgatattgtga

SEQ ID NO: 369 - protein, 197 aa, Medicago varia
MSASRFIKCVTVGDGAVGKTCLLISYTSNTFPTDYVPTVFDNFSANVVVNGSTVNLGLWDTAGQEDYNRLRPLSYRGADVFILAFSLISKASYENVSKKWIRELKHYAPGVPIILVGTKLDLRDDKQFFVDHPGAVPITTAQGEELRKLINAPAYIECSSKSQQNVKAVFDAAIRVVLQPPKQKKKKSKAQKACSIL

SEQ ID NO: 370 - DNA, 579 bp, Biomphalaria glabrata
  CDS (1)..(579)
atggcagcaatacgtaagaagcttgtgattgttggtgatggtgcatgtggtaaaacatgtctactgatagtttttagcaaagaccagtttcctgaagtttatgtgccaacagtttttgaaaattatgtagcagatattgaagtagatagcaaacaggtagaactagccttatgggacacagctggtcaagaggattatgataggcttcgaccattatcatatcctgatactgatgttattctaatgtgcttctctatagacagtccagacagtttggaaaatatccctgaaaaatggacccctgaggttcgtcatttttgcccaaacgttccgatcattcttgttggcaataagaaagatcttcgcaatgatgaaagcaccaaacgagaattgatgaaaatgaaacaagaacctgtgcggccagaagagggtagagccatggctgaaaaaatcaatgcctactcatacctcgagtgctctgctaaaacaaaggaaggtgtacgtgaagtgtttgaaactgctactagagctgcactccaagttaaaaagaagaaaaagggtggatgtattgtattgtga

SEQ ID NO: 371 - protein, 192 aa, Biomphalaria glabrata
MAAIRKKLVIVGDGACGKTCLLIVFSKDQFPEVYVPTVFENYVADIEVDSKQVELALWDTAGQEDYDRLRPLSYPDTDVILMCFSIDSPDSLENIPEKWTPEVRHFCPNVPIILVGNKKDLRNDESTKRELMKMKQEPVRPEEGRAMAEKINAYSYLECSAKTKEGVREVFETATRAALQVKKKKKGGCIVL

SEQ ID NO: 372 - DNA, 600 bp, Paracoccidioides brasiliensis
  CDS (1)..(600)
atggcctctggacccgctactcagtctctgaagtgcgttgttacgggtgatggtgctgttggcaagacatgtctgctcatatcttacaccacaaacgccttccctggagaatatattcctactgtgttcgataactattccgccagtgtaatggtagacgggaaaccaatcagtcttggactctgggatactgctggacaggaagattacgacagactgcgccccttgtcatacccacagaccgacgtattcctcatatgcttttctatcgttagcccgccatcgttcgataacgtaaaggcgaagtggtatccagaaatcgaacatcacgcacccaatgtgcccataattctcgtcgggaccaagctggatctgcgagatgataagaccactgctgacaatcttcgcgcgaagaagatggagccagtttcctatgaacaggcccttgcagttgctaaggagatcaaggcacaaaagtatctcgagtgctctgctcttacacagcgaaatttgaagagtgtctttgacgaagctatccgtgccgtactgaacccacgtcccattgccaaaccaaaaaagtccaaatgcagaatcctctaa

SEQ ID NO: 373 - protein, 199 aa, Paracoccidioides brasiliensis
MASGPATQSLKCVVTGDGAVGKTCLLISYTTNAFPGEYIPTVFDNYSASVMVDGKPISLGLWDTAGQEDYDRLRPLSYPQTDVFLICFSIVSPPSFDNVKAKWYPEIEHHAPNVPIILVGTKLDLRDDKTTADNLRAKKMEPVSYEQALAVAKEIKAQKYLECSALTQRNLKSVFDEAIRAVLNPRPIAKPKKSKCRIL

SEQ ID NO: 374 - DNA, 576 bp, Phallusia mammilata
  CDS (1)..(576)
atgcaaactataaaatgtgttgtggttggtgatggtgcggttggtaaaacttgtttattgatttcatacacaaccaacaaatttccacaagaatatgtgccaacggtattcgacaactatgcagtcactgttatgattggcggcgagccttacacactgggtctatttgatacagcaggccaggaggactatgatcgattaagaccactcagttacccgcaaactgatgttttccttgtttgtttttctgttgtttcaccatcctcatttgaaaatattaaagaaaagtgggtgccagaaattacacatcattgtcccaaaaccccatttttgcttgtgggaactcaagtggatttgcgtgatgatgctggaactattgaaaaattatcaaaaaacaaacagaagccaatcagtcaggagtctggagacaaactggcaagggagttaaaagccgtcaaatatgttgaatgttctgctttaacacagaaaggactcaaaaatgtttttgatgaagccatcttagctgcacttgaacctccggaacctaggcgcaaacgaaagtgcaacattttgtga

SEQ ID NO: 375 - protein, 191 aa, Phallusia mammilata
MQTIKCVVVGDGAVGKTCLLISYTTNKFPQEYVPTVFDNYAVTVMIGGEPYTLGLFDTAGQEDYDRLRPLSYPQTDVFLVCFSVVSPSSFENIKEKWVPEITHHCPKTPFLLVGTQVDLRDDAGTIEKLSKNKQKPISQESGDKLARELKAVKYVECSALTQKGLKNVFDEAILAALEPPEPRRKRKCNIL

SEQ ID NO: 376 - DNA, 636 bp, Gossypium hirsutum
  CDS (1)..(636)
atggcttcaagcgcttcaagatttatcaaatgtgtaacagttggagatggagctgttggcaagacttgcatgcttatttgctatacaagtaacaagttcccgaccgattacataccaacagtttttgataacttcagtgccaacgttgtagttgaaggcacaactgtgaacttaggtctttgggacacggctggacaagaggattacaacagactaaggccattgagctacagaggtgcagatgtctttgtcttagctttctcattagttagtcgagcaagccatgagaacgtactaaaaaagtggattcctgaacttcagcattatgccccaggcgtccctgtggttctggttggcaccaaattggatcttcgtgaggataaacattatctggctgatcatcctggcttgctgccggttagcaccgcacagggcgaggagctccgcaaacagataggtgctgcttattacattgagtgcagctcaaaaactcagcagaacgtgaaagcagtttttgatgatgcaatcaaagttgtaatcaagccaccccagaaacagaaggagaagaagaaaaagccaagtcgaggatgtctaataaatgtcttctgcgggaggaacttcgtgcctgctaaatga

SEQ ID NO: 377 - protein, 211 aa, Gossypium hirsutum
MASSASRFIKCVTVGDGAVGKTCMLICYTSNKFPTDYIPTVFDNFSANVVVEGTTVNLGLWDTAGQEDYNRLRPLSYRGADVFVLAFSLVSRASHENVLKKWIPELQHYAPGVPVVLVGTKLDLREDKHYLADHPGLLPVSTAQGEELRKQIGAAYYIECSSKTQQNVKAVFDDAIKVVIKPPQKQKEKKKKPSRGCLINVFCGRNFVPAK

SEQ ID NO: 378 - DNA, 588 bp, Gossypium hirsutum
  CDS (1)..(588)
atgagcgcctcgagattcataaagtgcgtcaccgtcggcgatggagccgtcggaaagacctgcttgctgatttcctacaccagcaacactttccctacggactatgtcccgactgttttcgacaatttcagtgcaaatgtcgtcgtcgatggcagcactgtcaacttaggtttatgggacactgctggtcaggaggattacaatagactacgaccactgagctatcgtggggctgatgtgtttattcttgcattttctctcatcagcaaggccagttatgaaaacgttgccaagaagtggattcctgaactaaagcattatgcccctggtgttccgatagttcttgttggaactaagcttgatctccgagatgatcaacaattcttaacagaccatcctaacgcagtgcccatttctacagctcagggagaggaattaaagaaacagattgcggctcctgcatacattgagtgtagctcaaaaacacagcagaatgtgaaggcagtgtttgatgcagccattaaggtagtgctgcagcctccgaataaaaataagaagaaaaagtcaggtggttgctcaatattatga

SEQ ID NO: 379 - protein, 195 aa, Gossypium hirsutum
MSASRFIKCVTVGDGAVGKTCLLISYTSNTFPTDYVPTVFDNFSANVVVDGSTVNLGLWDTAGQEDYNRLRPLSYRGADVFILAFSLISKASYENVAKKWIPELKHYAPGVPIVLVGTKLDLRDDQQFLTDHPNAVPISTAQGEELKKQIAAPAYIECSSKTQQNVKAVFDAAIKVVLQPPNKNKKKKSGGCSIL

SEQ ID NO: 380 - DNA, 600 bp, Aspergillus niger
  CDS (1)..(600)
  misc_feature (108)..(108): s is g or c
atggccactggtccagctactcaatccctcaagtgtgtggtgacgggtgatggtgcggtaggaaagacatgtctcctgatttcgtacacgaccaacgctttccccggsgaatatatccctaccgtatttgataactacaccgctagtgtcatggtagatggccgaccgattagcttgggactctgggatactgctggacaggaagattacgaccgtcttcgcccattgtcctacccgcaaaccgacgtcttcctgatctgcttctccatcgttagcccgccgtcctttgacaacgttaaagccaagtggttcccggagattgaacaccatgcccccaacgtccccattatcttggtcggcaccaagctcgaccttcgagacgaccgtggtaccatagatgctctccgacagcggaagatggagcccgtctcctacgaacaagctctggccgtggccaaggaaatccgggcacacaagtacctcgaatgttcggccctgacgcagcgcaacctgaagagtgtattcgacgaggcgattcgcgccgtgctcaatccccggcctgcggccaaaccgaagaacaagaaatgcgtgattctgtag

SEQ ID NO: 381 - protein, 199 aa, Aspergillus niger
MATGPATQSLKCVVTGDGAVGKTCLLISYTTNAFPGEYIPTVFDNYTASVMVDGRPISLGLWDTAGQEDYDRLRPLSYPQTDVFLICFSIVSPPSFDNVKAKWFPEIEHHAPNVPIILVGTKLDLRDDRGTIDALRQRKMEPVSYEQALAVAKEIRAHKYLECSALTQRNLKSVFDEAIRAVLNPRPAAKPKNKKCVIL

SEQ ID NO: 382 - DNA, 591 bp, Vigna radiata
  CDS (1)..(591)
atgagtacggccaggtttatcaagtgtgtaacagttggagatggtgctgtgggaaagacatgcatgctcatatcctataccagcaacacgtttcccacggattatgttccaactgtgtttgacaattttagtgctaatgtaactgtggacggtagtacggtgaatcttggtttatgggatactgcaggacaagaagattacaacaggctaaggcctttaagctatagaggagctgatgtgtttttgttgtgctattcgctcatcagcaaagccagttatgagaacatttccaaaaagtggatacctgagctcagacattatgctccaaatgtgcctatagtgctcgtgggaacaaaactagatttgcgagatgacaagcagtttctgattgatcatcccggaggcacacgaattacaactgctcagggtgaagaattgaagaaaatgattggtgcagtcacatatattgagtgcagctccaaaacacagcagaatgtgaagacagtttttgatgctgcaataaaggtcgcattgaggccaccaaagccaaagaagaaaccacgcaagaaaaggacctgttttttcctctaa

SEQ ID NO: 383 - protein, 196 aa, Vigna radiata
MSTARFIKCVTVGDGAVGKTCMLISYTSNTFPTDYVPTVFDNFSANVTVDGSTVNLGLWDTAGQEDYNRLRPLSYRGADVFLLCYSLISKASYENISKKWIPELRHYAPNVPIVLVGTKLDLRDDKQFLIDHPGGTRITTAQGEELKKMIGAVTYIECSSKTQQNVKTVFDAAIKVALRPPKPKKKPRKKRTCFFL

SEQ ID NO: 384 - DNA, 585 bp, Monacrosporium haptotylum
  CDS (1)..(585)
atgaccacacaatctctaaagtgcgtcgtgacaggcgatggtgccgtcggaaagacatgtctgctcatctcctacaccaccaatgctttcccaggcgaatacatccccaccgtcttcgacaactactccgctagtgtcatggtcgacggaaagcctatcagcttgggactgtgggatactgccggtcaggaggattacgacagactgagaccattgtcgtacccacagaccgatgttttccttatctgtttctcgctagtgtcgccgccatcattcgagaacgttaaaacaaagtggttcccggaaattagccatcacgcgccaaatgttccaattatcctcgtcggcaccaagctcgatttgagagacgacccaaagatccagcagtctttgaaggataagaagatggccccaatccagttcacaaatggtgtcgccatcgcaaaggatattggagctgtcaagtatctcgagtgctccgctctaacccagaagggtctgaagaacgttttcgacgaagccatcagagcagtcttgtcgccaccaccaaagccaaccaagagcaagaagtgcactatcctgtaa

SEQ ID NO: 385 - protein, 194 aa, Monacrosporium haptotylum
MTTQSLKCVVTGDGAVGKTCLLISYTTNAFPGEYIPTVFDNYSASVMVDGKPISLGLWDTAGQEDYDRLRPLSYPQTDVFLICFSLVSPPSFENVKTKWFPEISHHAPNVPIILVGTKLDLRDDPKIQQSLKDKKMAPIQFTNGVAIAKDIGAVKYLECSALTQKGLKNVFDEAIRAVLSPPPKPTKSKKCTIL

SEQ ID NO: 386 - DNA, 582 bp, Monacrosporium haptotylum
  CDS (1)..(582)
atggctgatatcagacgaaagcttgtcatcgtcggtgacggcgcgtgcggcaaaacctgtcttttgattgtcttctcaaaggggactttcccagaggtctatgttcctaccgttttcgagaattacgtcgccgatgtcgaagttgatggggagcatgtcgaattggcactatgggatacggcaggtcaagaggattacgacagacttcgaccgttgtcataccctgactcgcacgtgattttaatctgcttcgctatcgactcccctgactctcttgacaacgtacaggagaagtggatttctgaggtcttgcacttttgccaaggccttcctatcatcttggtcggctgcaagaaggatttgagatttgactccaagacaatggaagagctccgaaagacatcacaaaaaccagttactccggaggagggggagcaagtccgtgggaaaattggtgccgccaagtacctagagtgttccgctaaaacaaatgacggcgtgcgcgaggtcttcgaacatgccacccgtgctgcccttactactttcaagaagaagaagtcttctaaatgcagcattttgtaa

SEQ ID NO: 387 - protein, 193 aa, Monacrosporium haptotylum
MADIRRKLVIVGDGACGKTCLLIVFSKGTFPEVYVPTVFENYVADVEVDGEHVELALWDTAGQEDYDRLRPLSYPDSHVILICFAIDSPDSLDNVQEKWISEVLHFCQGLPIILVGCKKDLRFDSKTMEELRKTSQKPVTPEEGEQVRGKIGAAKYLECSAKTNDGVREVFEHATRAALTTFKKKKSSKCSIL

SEQ ID NO: 388 - DNA, 648 bp, Arabidopsis thaliana
  CDS (1)..(648)
atggcttcaagtgcttcaaagttcatcaagtgtgtgactgttggtgatggtgctgttggtaaaacctgtatgctcatctgctacaccagcaataaattccccactgactacataccaacagtttttgacaactttagtgcaaatgttgttgttgaaggcaccactgtcaatttggggctttgggacactgctgggcaagaagactataacagattaaggcctttaagttacaggggagcagatgttttcgtcttgtctttctcattagtcagccgagttagctacgagaatgtttttaaaaagtggatccctgaactccaacactttgctccaggagttccccttgtccttgttggtaccaaattagatcttcgtgaagataagcattatttggctgatcatcctggactatcccctgtaactactgcacagggagaggagttgcgtaagctaattggtgcgacgtattacattgagtgtagttcaaaaactcaacagaatgtgaaagcagtttttgattctgcgataaaggaagtgatcaaacctctggttaaacaaaaggagaagactaagaagaagaagaagcaaaagtcgaatcacggctgtttatcaaatgttctgtgtgggaggatagtgactcggcattga

SEQ ID NO: 389 - protein, 215 aa, Arabidopsis thaliana
MASSASKFIKCVTVGDGAVGKTCMLICYTSNKFPTDYIPTVFDNFSANVVVEGTTVNLGLWDTAGQEDYNRLRPLSYRGADVFVLSFSLVSRVSYENVFKKWIPELQHFAPGVPLVLVGTKLDLREDKHYLADHPGLSPVTTAQGEELRKLIGATYYIECSSKTQQNVKAVFDSAIKEVIKPLVKQKEKTKKKKKQKSNHGCLSNVLCGRIVTRH

SEQ ID NO: 390 - DNA, 594 bp, Medicago sativa
  CDS (1)..(594)
atgagtggttccaggttcatcaagtgtgtcactgttggtgatggtgccgttggaaagacttgtttgcttatctcttacaccagcaacactttccctacggactatgtgccgactgtctttgacaatttcagtgcaaatgtagttgtggatgggagcactataaatctcgggttgtgggatactgctggccaagaagattacaatagattaagacccttaagctatcgtggagcagatgtttttctgcttgctttttctctcataagcaaggccagctatgaaaatattgccaaaaaatggattcctgagttgaggcattatgctcctggtgttccaattattctcgttggaacaaaacttgatcttcgggatgatagccagttctttcaagaccatcctggtgcagcaccaataaccacagcacagggtgaggaactgagaaaacttatcggtgctccagtttacattgaatgtagttccaaaacacaaaagaatgtgaaggcagttttcgattcggccatcaaagtagttctacaaccgccaaagcaaaagaaaacaaagagaaaggggcaaaaagcatgttccattatgtga

SEQ ID NO: 391 - protein, 197 aa, Medicago sativa
MSGSRFIKCVTVGDGAVGKTCLLISYTSNTFPTDYVPTVFDNFSANVVVDGSTINLGLWDTAGQEDYNRLRPLSYRGADVFLLAFSLISKASYENIAKKWIPELRHYAPGVPIILVGTKLDLRDDSQFFQDHPGAAPITTAQGEELRKLIGAPVYIECSSKTQKNVKAVFDSAIKVVLQPPKQKKTKRKGQKACSIM

SEQ ID NO: 392 - DNA, 576 bp, Sitobion avenae
  CDS (1)..(576)
atgcagaccatcaagtgcgtggttgttggtgatggagctgttggtaagacttgtctgctcatatcgtacacgacaaacaagtttccttcagaatatgtaccgactgtttttgacaattatgcagtgaccgttatgattggcggggagccatatacattgggtttatttgatacagcaggtcaggaagattatgatcgcctcagacctttgagttatccacaaactgatgtgtttcttgtttgtttctccgtggtttcaccatcttcatttgaaaatgtcaaagaaaaatgggttccagagataacacgtcactgtcaaaaaacaccattcctgttggttggcacacaaatagaccttagagaagatgccacgactgtagagaaactagccaaaaataaacaaaaatcaatatcatctgaacaaggagagaagctagctaaagaacttaaagctgtaaaatatgttgaatgctcagcacttacacaaaaaggactaaaaaatgtatttgatgaagctattcttgcagctttagagcctcctgaaccagttaagaagaggaagtgtgttatattgtaa

SEQ ID NO: 393 - protein, 191 aa, Sitobion avenae
MQTIKCVVVGDGAVGKTCLLISYTTNKFPSEYVPTVFDNYAVTVMIGGEPYTLGLFDTAGQEDYDRLRPLSYPQTDVFLVCFSVVSPSSFENVKEKWVPEITRHCQKTPFLLVGTQIDLREDATTVEKLAKNKQKSISSEQGEKLAKELKAVKYVECSALTQKGLKNVFDEAILAALEPPEPVKKRKCVIL

SEQ ID NO: 394 - DNA, 576 bp, Rhopalosiphum padi
  CDS (1)..(576)
atgcagaccatcaagtgcgttgttgttggtgatggagctgtcggtaagacttgtctgctcatatcgtacacaacaaacaaatttccttcagaatatgtaccgactgttttcgacaattatgcagtgacagttatgattggtggggaaccatacacattaggtttatttgatacagcaggtcaggaagattatgatcgcctcagacctttgagttatccacaaactgatgtgtttcttgtttgtttctctgtggttttaccatcttcatttgaaaatgtcaaagaaaaatgggttccggagataacgcatcactgtcaaaaaacaccattcctgttggttggcacacaaatagaccttagagaagatgccacaactgtggagaaactagccaaaaataaacaaaaatcaatatcatttgaacaaggagagaagctagctaaagaacttaaagctgtgaaatatgtcgaatgctcagcacttacacaaaaaggactaaaaaatgtatttgatgaagctattcttgcagctttagagcctcctgaaccagttaagaagaggaagtgtgttatattgtaa

SEQ ID NO: 395 - protein, 191 aa, Rhopalosiphum padi
MQTIKCVVVGDGAVGKTCLLISYTTNKFPSEYVPTVFDNYAVTVMIGGEPYTLGLFDTAGQEDYDRLRPLSYPQTDVFLVCFSVVLPSSFENVKEKWVPEITHHCQKTPFLLVGTQIDLREDATTVEKLAKNKQKSISFEQGEKLAKELKAVKYVECSALTQKGLKNVFDEAILAALEPPEPVKKRKCVIL

SEQ ID NO: 396 - DNA, 576 bp, Pneumocystis carinii
  CDS (1)..(576)
atgcaaactattaaatgtgtcgttgttggggatggcgcggttggtaaaacgtgtcttttaatatcctatacgacaaacaaatttccttcagaatatgttcctactgtatttgataattatgcggttaccgtaatgattggagaagaaccttatactttaggactttttgatacagcaggtcaagaagattatgacagattgcgtcccttatcatatccacaaacggatgtttttcttatttgcttttctgttactagtccagcaagttttgaaaatgtaagagaaaagtggcatccagaggttcgtcatcattgtccaggaacaccctgtcttattgttggtacacaaatcgatttacgagatgatcctatgattgtagagaaactcagtcgacaaagacaaacccccattacaaaagaattaggtgaaaaactttcaaaagaattgggtgctgtaaaatatgttgagtgctcagctttgactcaaaaaggattaaaaaacgtttttgatgaagctatagtttgcgcacttgaaccacccgttacgaagaagaaaactaaatgtcttattttataa

SEQ ID NO: 397 - protein, 191 aa, Pneumocystis carinii
MQTIKCVVVGDGAVGKTCLLISYTTNKFPSEYVPTVFDNYAVTVMIGEEPYTLGLFDTAGQEDYDRLRPLSYPQTDVFLICFSVTSPASFENVREKWHPEVRHHCPGTPCLIVGTQIDLRDDPMIVEKLSRQRQTPITKELGEKLSKELGAVKYVECSALTQKGLKNVFDEAIVCALEPPVTKKKTKCLIL

SEQ ID NO: 398 - DNA, 615 bp, Paracoccidioides brasiliensis
  CDS (1)..(615)
atggcacaacaacagctgcagcagctgcagacggagaatgtcatgagaaggaagctggtgataataggagatggtgcttgcggcaagacaagtttgttgagtgtgtttactcttggctatttcccgactcattatgttcctacagttttcgaaaactacgtaacagattgtcgcgttgacggtcgatcagtccaactcgctctgtgggatactgctgggcaggaagattacgaacgtttacgaccacttgcatattcaaaggcccatgttctcctaattgcgttcgcggtagatactccagattctcttgagaacgttcggaataagtggattgaagaagcaaatgaacgctgccccgatgtcccaatcatactggtgggcttgaagaaagatctgcgcgaggacccccttgcaattgaagaaatgagaaagaagtctctgcgctttgtttcctcgaaggaaggccacgacacagcagcccaggtcggggcaagaaaatacttagaatgctcatccctcaccggcgaaggtgtcgatgacgttttcgaagctgcaacccgcgcagctcttttaactttcgaaaaggacagaggatcttgctgcgttatcctatga

SEQ ID NO: 399 - protein, 204 aa, Paracoccidioides brasiliensis
MAQQQLQQLQTENVMRRKLVIIGDGACGKTSLLSVFTLGYFPTHYVPTVFENYVTDCRVDGRSVQLALWDTAGQEDYERLRPLAYSKAHVLLIAFAVDTPDSLENVRNKWIEEANERCPDVPIILVGLKKDLREDPLAIEEMRKKSLRFVSSKEGHDTAAQVGARKYLECSSLTGEGVDDVFEAATRAALLTFEKDRGSCCVIL

SEQ ID NO: 400 - DNA, 579 bp, Tigriopus japonicus
  CDS (1)..(579)
atggcggctattcgcaagaaattagtgattgtgggcgatggcgcctgcggcaagacctgcctcttgatcgtgttctccaaggatcaattccccgaggtgtatgtgcccacagtgttcgaaaactacgtggctgacatcgaagtggacggcaagcaagtggaactggccttgtgggatacggccggtcaggaggactacgatcgactccgacccctgtcctatccggatacggatgtgatcctgatgtgtttctcgatcgactcgcccgattcgctcgagaacatccctgagaagtggacgcccgaagtcaaacacttctgccctaatgtgcccattatcctcgtgggaaacaaaaaagacttgcgcaatgatcccaataccatcaaggagttgggcaagatgaaacaagaaccggtcaagccggaagagggtcgcacaatggccgaaaagatcaacgccttcgcctacctcgagtgttcggccaagagcaaggaaggcgtcagagaagtctttgagacagccacccgagcggcattacaggtcaagaagaaaaagaagaagccttgcgttctcttttaa

SEQ ID NO: 401 - protein, 192 aa, Tigriopus japonicus
MAAIRKKLVIVGDGACGKTCLLIVFSKDQFPEVYVPTVFENYVADIEVDGKQVELALWDTAGQEDYDRLRPLSYPDTDVILMCFSIDSPDSLENIPEKWTPEVKHFCPNVPIILVGNKKDLRNDPNTIKELGKMKQEPVKPEEGRTMAEKINAFAYLECSAKSKEGVREVFETATRAALQVKKKKKKPCVLF

SEQ ID NO: 402 - DNA, 576 bp, Paracoccidioides brasiliensis
  CDS (1)..(576)
atggctgagattcgtcgtaaacttgtcattgttggtgatggtgcctgtggtaaaacttgtctcttgattgtcttttccaagggtaccttccctgaggtctacgtcccaaccgtcttcgagaactatgtggccgacgttgaggtcgatggaaagcatgtcgagctcgcactttgggatacggctggccaggaagattacgatcgactcagacctctttcctaccctgattcacatgttattctgatctgtttcgctatcgattcccccgactctctcgacaacgtccaggagaagtggatttctgaagtccttcatttctgccagggtcatcccattatcctcgttggttgcaagaaagatcttcgtgacgaccccagaacgattgaggagctgcgcaagacgtctcagaagcccgtgaccaccgaacagggtgaggaggtccgcaagaagattggcgcttacaagtatctggaatgctccgcccgaacaaacgacggagttcgtgaggtgttcgagtcagctactcgagctgcactgctggcgaagaaggagaaaaagaaatgcaagatcttgtaa

SEQ ID NO: 403 - protein, 191 aa, Paracoccidioides brasiliensis
MAEIRRKLVIVGDGACGKTCLLIVFSKGTFPEVYVPTVFENYVADVEVDGKHVELALWDTAGQEDYDRLRPLSYPDSHVILICFAIDSPDSLDNVQEKWISEVLHFCQGHPIILVGCKKDLRDDPRTIEELRKTSQKPVTTEQGEEVRKKIGAYKYLECSARTNDGVREVFESATRAALLAKKEKKKCKIL

SEQ ID NO: 404 - DNA, 591 bp, Schizophyllum commune
  CDS (1)..(591)
atgcaggccatcaagtgtgttgtcgtaggagatggtgcggtcggaaagacctgcctgctaatctcgtataccacgaacgcgttcccgggagaatatatcccgaccgtgttcgataactactccgccaatgtcatggtcgacggcaagactatctccctcgggctttgggataccgctggtcaagaagattacgaccgtctccgcccgctctcctaccctcagacggatgtcttcttgatttgtttctcgctcgtcagcccgccaagtttcgagaacgtccggaccaagtggtaccctgaaatatcgcatcacgcaccgcagacgcccgtcgtgctcgtgggcaccaagctggatttgcgagaggaccctgcgacgatagagaaactgcgtgaccgccgcatgtcccccatccagtactcgcagggtgtcgcgatgatgaaggacatcggtgctgtgaagtacctagagtgttccgcgctgacgcaaaaggggctcaagaccgtgtttgacgaggcgatccgtgttgtcttgtacccgtccgcgcggtccgacaacaaacgcagcaagggccgctcatgcattgtcgcataa

SEQ ID NO: 405 - protein, 196 aa, Schizophyllum commune
MQAIKCVVVGDGAVGKTCLLISYTTNAFPGEYIPTVFDNYSANVMVDGKTISLGLWDTAGQEDYDRLRPLSYPQTDVFLICFSLVSPPSFENVRTKWYPEISHHAPQTPVVLVGTKLDLREDPATIEKLRDRRMSPIQYSQGVAMMKDIGAVKYLECSALTQKGLKTVFDEAIRVVLYPSARSDNKRSKGRSCIVA

SEQ ID NO: 406 - DNA, 657 bp, Hordeum vulgare
  Hordeum vulgare var
  CDS (1)..(657)
atgagcggcggagcgggggcggcgacggcggtgagcaggttcatcaagtgcgtggccgtgggcgacggcgccgtgggcaagacctgcatgctcatctgctacacctgcaacaagttccccaccgactacatccccaccgtgttcgacaacttcagcgccaatgtctccgtggacgggagcatcgtcaacctcggcctctgggacaccgcaggtcaggaggattacagcaggctgaggcctctgagctacaggggagccgatgtcttcatcctctccttctccctcaccagcagagcaagctatgagaatgtgcacaagaagtggatgccggagcttcgccggtacgcccccggcattcctgtactgcttgttggaaccaagttggatctccgggaggatagagcttatcttgctgatcatgcagctgattccatcataacaactgagcagggtgaggatcttaggagacaaataggtgctgtggcatacatagaatgcagctccaagacacaaaggaacattaaggctgttttcgacaccgcaatcaaggcggttcttcaacctcaaaggcacaaggaggtagccagaaaggaaactcggacacgctctagtcggtcagtaaggcagtacttctgtgggagttcttgtttcgcgtag

SEQ ID NO: 407 - protein, 218 aa, Hordeum vulgare
  Hordeum vulgare var
MSGGAGAATAVSRFIKCVAVGDGAVGKTCMLICYTCNKFPTDYIPTVFDNFSANVSVDGSIVNLGLWDTAGQEDYSRLRPLSYRGADVFILSFSLTSRASYENVHKKWMPELRRYAPGIPVLLVGTKLDLREDRAYLADHAADSIITTEQGEDLRRQIGAVAYIECSSKTQRNIKAVFDTAIKAVLQPQRHKEVARKETRTRSSRSVRQYFCGSSCFA

SEQ ID NO: 408 - DNA, 642 bp, Hordeum vulgare
  Hordeum vulgare var
  CDS (1)..(642)
atggcgtccagcgcctcccggttcatcaagtgcgtcacggtgggcgacggcgccgtcggcaagacctgcatgctcatctgctacaccagcaacaagttccccaccgactacatacccacggtgttcgacaatttcagcgcgaacgtggtggcggacggcaccacggtgaatttgggcctttgggacaccgccgggcaggaggattacaaccggctgaggcctctaagctaccgcggcgccgacgttttcgtgcttgccttctcccttgtgagccgagctagctatgagaatatcatgaagaagtggataccggagcttcagcattacgcgcccggcgtacctgttgtgctggtaggcacaaaactggatcttcgtgaagataagcactatttgctggaccaccctgggatgatacccgttaccacagcacagggggaggaacttcgtaagcaagttggtgctttatattacatagagtgcagctcaaagacacaacagaatgtcaaagctgtgtttgatgctgctatcaaggtagtaatccagcccccaactaaacaaagagaaaagaagaaaaagaaacagcgtcggggatgttctatgatgaacttcagcggaaggaaaatgctatgcttcaaatcctga

SEQ ID NO: 409 - protein, 213 aa, Hordeum vulgare
  Hordeum vulgare var
MASSASRFIKCVTVGDGAVGKTCMLICYTSNKFPTDYIPTVFDNFSANVVADGTTVNLGLWDTAGQEDYNRLRPLSYRGADVFVLAFSLVSRASYENIMKKWIPELQHYAPGVPVVLVGTKLDLREDKHYLLDHPGMIPVTTAQGEELRKQVGALYYIECSSKTQQNVKAVFDAAIKVVIQPPTKQREKKKKKQRRGCSMMNFSGRKMLCFKS

SEQ ID NO: 410 - DNA, 642 bp, Hordeum vulgare
  CDS (1)..(642)
atggcgtccagcgcctcccggttcatcaagtgcgtcaccgtcggggacggcgccgtcggcaagacctgcatgctcatctgctacaccagcaacaagttccccaccgactacgtgcccaccgtgttcgacaatttcagcgcgaacgtggtggtggacggcaccaccgtgaacctgggcctctgggacactgcagggcaggaggactacaacagattgagaccgctgagctaccggggagccgacgtcttcgtgctctccttctcgctcgtcagccgagccagctacgagaatgtcatgaagaagtggctaccggagcttcagcaccatgcacccggcgtgccaacagtgctggttggtacaaagctagatctacgtgaagacaagcaatacttacttgaccaccccggcgtggtgcctgttactacagctcagggggaggaactccgcaagcacatcggtgcaacttgttatgtcgaatgcagctcaaagacacagcagaatgtcaaagctgtgtttgatgctgccatcaaggtagtgatcaaacctccaacaaagcagagggaaaggaggaagaagaaagcacggcaaggatgtgcatcattgggtaccctgtcaagaaggaagctggcatgcttcaagtga

SEQ ID NO: 411 - protein, 213 aa, Hordeum vulgare
MASSASRFIKCVTVGDGAVGKTCMLICYTSNKFPTDYVPTVFDNFSANVVVDGTTVNLGLWDTAGQEDYNRLRPLSYRGADVFVLSFSLVSRASYENVMKKWLPELQHHAPGVPTVLVGTKLDLREDKQYLLDHPGVVPVTTAQGEELRKHIGATCYVECSSKTQQNVKAVFDAAIKVVIKPPTKQRERRKKKARQGCASLGTLSRRKLACFK

SEQ ID NO: 412 - DNA, 594 bp, Hordeum vulgare
  CDS (1)..(594)
atgagcgcatctcggttcatcaagtgcgtgacggtgggggacggcgccgtgggaaagacatgcctcctcatctcatacacatccaacaccttccccacagactatgtcccaacagttttcgacaacttcagcgctaacgtcgtggttgacggcagcaccgtcaacctcggattatgggatactgcaggacaagaagactataatcgactacgcccactaagctaccgtggtgccgatgtcttcctgctcgccttttctctcatcagcaaagcaagctacgagaatgtcactaagaagtggattccagagttacggcactatgctcctggcgtgcccataattcttgttggaacaaagcttgatctgcgggatgacaagcagttttttgtggatcaccctggggcggttcctatttccactgctcagggtgaagagctgaagaaggtgattggcgcgactgcctacatcgagtgcagctcaaaaacacagcagaacatcaaggcggtgtttgatgcggcgatcaaggtggtcctccagcctccgaagcagaagcggaagaagaggaagtcacagaaaggatgcagcatcttgtaa

SEQ ID NO: 413 - protein, 197 aa, Hordeum vulgare
MSASRFIKCVTVGDGAVGKTCLLISYTSNTFPTDYVPTVFDNFSANVVVDGSTVNLGLWDTAGQEDYNRLRPLSYRGADVFLLAFSLISKASYENVTKKWIPELRHYAPGVPIILVGTKLDLRDDKQFFVDHPGAVPISTAQGEELKKVIGATAYIECSSKTQQNIKAVFDAAIKVVLQPPKQKRKKRKSQKGCSIL

SEQ ID NO: 414 - DNA, 639 bp, Hordeum vulgare
  CDS (1)..(639)
atgagcgtgaccaagttcatcaagtgcgtcacggtgggggacggcgccgtcggcaagacctgcatgctcatctgctacaccagcaacaggttccccagtgattacatccccacggtgttcgacaacttcagcgccaacgtctccgtcgacggcaacatcgtcaacctcggcctatgggacaccgccgggcaagaagactacagccggctgaggccgctgagctacagaggcgccgacgtgttcgtgctcgccttctccctcatcagcagcgccagctacgagaatgttcttaagaagtggatgccagagctccgccggttcgcgccgaatgtccccattgttcttgttgggaccaagctagatctgcgtgaccacagagcctacctcgccgaccaccccggtgcttcagcaatcacaactgcacagggtgaagaacttaggaagcagatcggcgccgcggcttacatcgagtgcagctccaagacacagcagaacgtcaaggctgtgtttgacaccgccataaaggtggtcctccagccgccgaggagaagggaggtgatgtccgccaggaagaaaaccaggcgaagctctggatgctccatcaagcacttgatctgcgggagtacgtgcgctgcttga

SEQ ID NO: 415 - protein, 212 aa, Hordeum vulgare
MSVTKFIKCVTVGDGAVGKTCMLICYTSNRFPSDYIPTVFDNFSANVSVDGNIVNLGLWDTAGQEDYSRLRPLSYRGADVFVLAFSLISSASYENVLKKWMPELRRFAPNVPIVLVGTKLDLRDHRAYLADHPGASAITTAQGEELRKQIGAAAYIECSSKTQQNVKAVFDTAIKVVLQPPRRREVMSARKKTRRSSGCSIKHLICGSTCAA

SEQ ID NO: 416 - DNA, 576 bp, Ciona intestinalis
  CDS (1)..(576)
atgcaaaccataaaatgtgtggttgttggtgatggtgctgttggtaaaacctgccttcttatctcatacacaactaataagtttcctcaagagtatgtcccgactgtgtttgacaactatgcagttacagtaatgattggtggagaaccatataccttgggattatttgatacagcaggccaggaagattatgacagattacgacccctaagctacccccaaactgatgtcttcttagtttgcttttcggttgtttcaccatcatcatacgaaaatataaaagaaaagtgggtgccagaaatcactcaccattgtccaaagactccattcttgctggttggtacacaagttgatttaagggacgatgctgcaactatagaaaagttatctaaaaataaacaaaaagcaattactcaagatatgggtgataaacttgcaagggaattaaaagctgtaaaatatgttgaatgttcagctctgactcagcgtggtttaaaaaatgtctttgatgaagcaattcttgctgcattggaaccaccccaggaaaagaaaaagggtgcttgccgtgtgatataa

SEQ ID NO: 417 - protein, 191 aa, Ciona intestinalis
MQTIKCVVVGDGAVGKTCLLISYTTNKFPQEYVPTVFDNYAVTVMIGGEPYTLGLFDTAGQEDYDRLRPLSYPQTDVFLVCFSVVSPSSYENIKEKWVPEITHHCPKTPFLLVGTQVDLRDDAATIEKLSKNKQKAITQDMGDKLARELKAVKYVECSALTQRGLKNVFDEAILAALEPPQEKKKGACRVI

SEQ ID NO: 418 - DNA, 600 bp, Colletotrichum trifolii
  CDS (1)..(600)
atggctcaaccaggagtacagtcgctgaagtgtgtggtgacgggtgacggtgctgtcggaaagacatgtttgctgatttcctacacaacgaacgcctttcctggcgagtacattcctactgtcttcgacaactactcggcgagtgtaatggtggacggaaagcctattagcttgggactgtgggatactgccggccaggaagattacgacagactgcgaccgctttcctacccccagaccgacgtcttcctgatttgcttctccatcgtcagccccccatcgtttgacaacgtcaaggccaagtggtaccccgaaatcgatcatcacgcccccaacatccccattatcctcgtcggcaccaagctggatttgagggaggatcccaacaccctcgagtccctccgccaaaagcggatggagcccgtgtcgtacgatcaagccctgatctgcgccaaggaaattaaggcacacaaatacctggagtgttctgccctgacacagaggaatctgaagagcgtttttgacgaggccattcgtgctgtcctgaaccccaggcccgtcgcgcagcagaagaagaagtcgaagtgtacgattttgtga

SEQ ID NO: 419 - protein, 199 aa, Colletotrichum trifolii
MAQPGVQSLKCVVTGDGAVGKTCLLISYTTNAFPGEYIPTVFDNYSASVMVDGKPISLGLWDTAGQEDYDRLRPLSYPQTDVFLICFSIVSPPSFDNVKAKWYPEIDHHAPNIPIILVGTKLDLREDPNTLESLRQKRMEPVSYDQALICAKEIKAHKYLECSALTQRNLKSVFDEAIRAVLNPRPVAQQKKKSKCTIL

SEQ ID NO: 420 - DNA, 576 bp, Aplysia californica
  CDS (1)..(576)
atgcaaaccataaagtgtgtggttgtgggggatggggcagtcggaaaaacctgccttctcatttcatacaccacaaataaatttccttcagaatatgtgccaacagtgtttgacaactatgcggtgaccgtgatgatcgggggagagccctacaccctgggcctgtttgataccgcgggtcaggaggactacgacaggctacgtccactcagctaccctcagacggacgtcttcctcgtctgcttctccgtggtcaccccgtcctccttcgagaatgtcagggaaaagtgggttccggagatcacacatcactgtcagcgcacgccgttcctgctggtggggacacagattgatctgcgcgacgacacgcccacggtggagaagctggccaagaacaaacagaagcccatcaccgccgaccacggggagcgtctggcccgcgagctcagggcggtcaagtacgtcgagtgctccgccctcaaccagagaggtctgaagaacgtgtttgatgaggctatcctggcagcgctagaacccccagagccacccaagaaaaagaaatgtgtgctcttgtaa

SEQ ID NO: 421 - protein, 191 aa, Aplysia californica
MQTIKCVVVGDGAVGKTCLLISYTTNKFPSEYVPTVFDNYAVTVMIGGEPYTLGLFDTAGQEDYDRLRPLSYPQTDVFLVCFSVVTPSSFENVREKWVPEITHHCQRTPFLLVGTQIDLRDDTPTVEKLAKNKQKPITADHGERLARELRAVKYVECSALNQRGLKNVFDEAILAALEPPEPPKKKKCVLL

SEQ ID NO: 422 - DNA, 579 bp, Aplysia californica
  CDS (1)..(579)
atgcaggctatcaagtgtgtggtagtcggggacggtgctgtgggtaagacatgtcttcttatcagctacactaccaatgccttccccggagaatacattccaactgtctttgacaactactctgcaaatgttatggtagatggcaagccaatcaatcttggactatgggatactgctggacaagaggactatgatcgtctcagacccttgtcatatccgcaaactgatgtctttcttatatgtttttccttgatcagtcctacaagtttcgagaatgttcgagcaaagtggtttcctgaagtgagccatcattgccctcatacccctatcatcttagtgggtaccaagcttgatctgcgtgaagacaaggagacaattgagaaactgagagacaagaagctgtcccctatcacctaccctcaagggctggccatggcaagggagataagtgctgtgaagtatcttgagtgctcagccttaacccaaaaagggctgaagaatgtctttgatgaggctattcgggctgttttgtgccctaagcctaagccaaagaagaagaaaggatgcgaaattttgtga

SEQ ID NO: 423 - protein, 192 aa, Aplysia californica
MQAIKCVVVGDGAVGKTCLLISYTTNAFPGEYIPTVFDNYSANVMVDGKPINLGLWDTAGQEDYDRLRPLSYPQTDVFLICFSLISPTSFENVRAKWFPEVSHHCPHTPIILVGTKLDLREDKETIEKLRDKKLSPITYPQGLAMAREISAVKYLECSALTQKGLKNVFDEAIRAVLCPKPKPKKKKGCEIL

SEQ ID NO: 424 - DNA, 633 bp, Nicotiana tabacum
  CDS (1)..(633)
atggcctcaagtgcttcaagattcatcaaatgtgtcacggttggtgatggtgccgttggaaagacttgtatgcttatttgctataccagtaacaagttccccactgattatgttcccacagtgtttgacaacttcagtgccaatgtggttgtcgaagggaccacagtaaatttaggtctttgggatactgcaggccaagaagattataacagattaaggccactgagctaccgaggagcagatgtttttgtcctagcgttctccttggttagtcgcgcaagctacgagaacatacttaaaaagtggattcctgaacttcagcattatgctcctggaataccggtggtattagctggcaccaaacttgatcttcgtgaggataagcacttcttggctgatcatcctggattagttcctgtcaccaccgcgcagggagaggagctacggaaacaaattggtgctgcctattacatcgaatgtagctctaaaacacaacagaatgtgaaagctgtctttgatgctgcaatcaaggtcgtcatcaagccaccgcagaagcaaaaggagaagaagaaacaacgtcgaggatgtctcatgaatgtgatgtgcggaaggaagctcgtttgtttgaagtga

SEQ ID NO: 425 - protein, 210 aa, Nicotiana tabacum
MASSASRFIKCVTVGDGAVGKTCMLICYTSNKFPTDYVPTVFDNFSANVVVEGTTVNLGLWDTAGQEDYNRLRPLSYRGADVFVLAFSLVSRASYENILKKWIPELQHYAPGIPVVLAGTKLDLREDKHFLADHPGLVPVTTAQGEELRKQIGAAYYIECSSKTQQNVKAVFDAAIKVVIKPPQKQKEKKKQRRGCLMNVMCGRKLVCLK

SEQ ID NO: 426 - DNA, 594 bp, Brassica napus
  CDS (1)..(594)
atgagcgcatcgagattcgcaaagtgtgtgacggttggtgatggagctgtcggaaaaacatgtttgttgatttcttacacaagcaacactttccctacggattatgtgccaactgttttcgataatttcagtgcaaatgttgtggttaatggagccaccgttaatcttggattgtgggatactgcagggcaagaggattacaacagattaagaccactaagctaccgtggagctgatgttttcatattggccttctctcttatcagtaaagccagttatgaaaacgtctccaaaaagtggatcccggagttgaagcattacgcgcctggtgtccccatcatccttgttggatcaaagcttgatcttcgagatgataagcaattcttcgtcgaccatcctggcgctgtcccgattacaactgctcagggagaggagctgaggaagctaatagatgcacctacttacatcgaatgcagttccaaatctcaagagaatgtgaaagctgtctttgacgcagccatacgagtggtgttgcaaccgcctaagcagaagaagaaaaagagcaaaacgcagaaggcatgctccatccaatga

SEQ ID NO: 427 - protein, 197 aa, Brassica napus
MSASRFAKCVTVGDGAVGKTCLLISYTSNTFPTDYVPTVFDNFSANVVVNGATVNLGLWDTAGQEDYNRLRPLSYRGADVFILAFSLISKASYENVSKKWIPELKHYAPGVPIILVGSKLDLRDDKQFFVDHPGAVPITTAQGEELRKLIDAPTYIECSSKSQENVKAVFDAAIRVVLQPPKQKKKKSKTQKACSIQ

SEQ ID NO: 428 - DNA, 594 bp, Brassica napus
  CDS (1)..(594)
atgagcgcatctcggttcataaagtgcgtgacggttggggacggagcagtgggcaaaacatgtctcctcatctcttacaccagcaacactttccctacggattatgttccaactgttttcgataacttcagcgctaatgttgttgttaacggagccactgtcaacttaggactctgggataccgcagggcaggaggattataacagattgagacccttgagttaccgcggtgctgacgttttcatcttggccttctctctcatcagtaaggctagttatgagaatgtctccaagaagtggatccctgagctgacccactatgcccctggtgtccctatcgttcttgttggtaccaaactagatcttagggatgacaaacagttcttcgttgaccaccctggtgctgtacctattaccacttctcagggagaggaactaatgaagctaattggagctccttcgtacatcgagtgcagttcaaaatctcaagagaacgtgaaaggggtgtttgatgcagcgatcagagtggtacttcaacctccaaagcagaagaaaaagaagagcaaggcacaaaaggcctgctccattttgtaa

SEQ ID NO: 429 - protein, 197 aa, Brassica napus
MSASRFIKCVTVGDGAVGKTCLLISYTSNTFPTDYVPTVFDNFSANVVVNGATVNLGLWDTAGQEDYNRLRPLSYRGADVFILAFSLISKASYENVSKKWIPELTHYAPGVPIVLVGTKLDLRDDKQFFVDHPGAVPITTSQGEELMKLIGAPSYIECSSKSQENVKGVFDAAIRVVLQPPKQKKKKSKAQKACSIL

SEQ ID NO: 430 - DNA, 594 bp, Brassica napus
  CDS (1)..(594)
atgagcgcatcgagattcgtaaagtgtgtgacggttggtgatggagctgtcggaaaaacatgtttgctgatttcttacacaagcaacactttccctacggattatgtgccaaccgttttcgataatttcagtgcaaatgttgtggttaatggagccaccgttaatcttggattgtgggatactgcagggcaagaggattacaacagattaagaccactaagctaccgtggagcagatgttttcatattggccttctctcttattagtaaagccagttatgaaaacgtctccaaaaagtggatcccggagttgaaacattacgcgcctggtgtcccaatcattcttgttggatcaaagcttgatcttcgagatgataagcaattcttcgtcgaccatcctggcgctgtcgcgattacaactgctcagggagaggagctgaggaagctaatagatgcacctacttacatcgaatgcagttccaaatctcaagagaatgtgaaagccgtctttgatgcagccatacgagtggtgttgcaaccgcctaagcagaagaagaaaaagagcaaagcgcaaaaggcatgctccatccaatga

SEQ ID NO: 431 - protein, 197 aa, Brassica napus
MSASRFVKCVTVGDGAVGKTCLLISYTSNTFPTDYVPTVFDNFSANVVVNGATVNLGLWDTAGQEDYNRLRPLSYRGADVFILAFSLISKASYENVSKKWIPELKHYAPGVPIILVGSKLDLRDDKQFFVDHPGAVAITTAQGEELRKLIDAPTYIECSSKSQENVKAVFDAAIRVVLQPPKQKKKKSKAQKACSIQ

SEQ ID NO: 432 - DNA, 594 bp, Brassica napus
  CDS (1)..(594)
atgagcggcttcagattcgtaaagtgtgtgacagttggtgatggagctgtcggaaaaacatgtttgttgatttcttacacaagcaacactttccctacggattatgtgccaactgttttcgataatttcagtgcaaatgttgtggttaatggagccaccgttaatcttggattgtgggatactgcagggcaagaggattacaacagattaagaccactaagctaccgtggagctgatgttttcatattggccttctctcttatcagtaaagccagttatgaaaacgtctccaaaaagtggatcccggagttgaagcattacgcgcctggtgtccccatcatccttgttggatcaaagcttgatcttcgagatgataagcaattcttcgtcgaccatcctggcgctgtcccgattacaactgctcagggagaggagctgaggaagctaatagatgcacctacttacatcgaatgcagttccaaatctcaagagaatgtgaaagctgtctttgacgcagccatacgagtggtgttgcaaccgcctaagcagaagaagaaaaagagcaaagcgcagaaggcatgctccatccagtga

SEQ ID NO: 433 - protein, 197 aa, Brassica napus
MSGFRFVKCVTVGDGAVGKTCLLISYTSNTFPTDYVPTVFDNFSANVVVNGATVNLGLWDTAGQEDYNRLRPLSYRGADVFILAFSLISKASYENVSKKWIPELKHYAPGVPIILVGSKLDLRDDKQFFVDHPGAVPITTAQGEELRKLIDAPTYIECSSKSQENVKAVFDAAIRVVLQPPKQKKKKSKAQKACSIQ

SEQ ID NO: 434 - DNA, 594 bp, Brassica napus
  CDS (1)..(594)
atgagcgcatctcggttcataaagtgtgtaacggttggtgatggagctgtcggaaaaacatgtttgttgatttcttacacaagcaacactttccctacggactatgtgcccaccgttttcgataatttcagtgctaatgtggtggttaacggagccaccgttaatcttggattgtgggatactgcagggcaagaggattacaacagattaagaccactaagctaccgtggagctgatgttttcatattggccttctctcttatcagtaaagccagttatgaaaacgtctccaaaaagtggatcccggagttgaagcattacgcgcctggtgtccccgtcatccttgttggatcaaagcttgatcttcgagatgataagcaattcttcgtcgaccatcctggcgctgtcccgattacaactgctcagggagaggagctgaggaagctaatagatgcacctacttacatcgaatgcagttccaaatctcaagagaatgtgaaagctgtctttgacgcagccatacgagtggtgttgcaaccgcctaagcagaagaagaaaaagagcaaagcgcagaaggcatgctccatccagtga

SEQ ID NO: 435 - protein, 197 aa, Brassica napus
MSASRFIKCVTVGDGAVGKTCLLISYTSNTFPTDYVPTVFDNFSANVVVNGATVNLGLWDTAGQEDYNRLRPLSYRGADVFILAFSLISKASYENVSKKWIPELKHYAPGVPVILVGSKLDLRDDKQFFVDHPGAVPITTAQGEELRKLIDAPTYIECSSKSQENVKAVFDAAIRVVLQPPKQKKKKSKAQKACSIQ

SEQ ID NO: 436 - DNA, 594 bp, Zinnia elegans
  CDS (1)..(594)
atgagtgcatcaagatttataaagtgtgttactgttggtgatggggctgttggaaagacttgtttgttgatttcttacaccagtaataccttccctacggattacgtcccaacggtatttgataatttcagtgctaatgtagttgtcaatggaagcacagttaatctaggcttgtgggacactgctggacaggaggactataacagattaagaccgttgagttatcgtggagctgatgttttcattttggcgttctcactcattagcaaggctagctatgagaacgtttccaagaagtggattccagaattgaagcattatgctcctggtgttccaatcgttcttgttgggacgaaactagatctccgagatgataagcagttttttgtagatcaccctggtgcaactcctattaccactgcacagggagaggaattaaagaagacaatcggtgctcctgagtacattgaatgtagttcaaaaacacaattgaatgtgaagcaagttttcgatgctgccattaaagtcgttctggcgcctccaaaggcgaagaaaaagaagggaaaagctcaaaaggcatgctcaatattgtga

SEQ ID NO: 437 - protein, 197 aa, Zinnia elegans
MSASRFIKCVTVGDGAVGKTCLLISYTSNTFPTDYVPTVFDNFSANVVVNGSTVNLGLWDTAGQEDYNRLRPLSYRGADVFILAFSLISKASYENVSKKWIPELKHYAPGVPIVLVGTKLDLRDDKQFFVDHPGATPITTAQGEELKKTIGAPEYIECSSKTQLNVKQVFDAAIKVVLAPPKAKKKKGKAQKACSIL

SEQ ID NO: 438 - DNA, 597 bp, Zinnia elegans
  CDS (1)..(597)
atggcagcagcagccaccagattcatcaagtgcgtcaccgttggcgacggtgcggtcggaaaaacctgcatgctcatctcctacaccagcaatactttccccaccgattatgtgccgacagtgtttgataacttcagtgcgaatgttgtggtcggagacagcactgtcaatcttggcctttgggatactgccggtcaggaggattataacagactgaggccactgagttatagaggtgcagatgtgtttttattggcattttctctcattagcagacccagttatgaaaacatctccaagaagtggatctcagaactaaggcattatgccccagatgtccccattgtgctggtgggaaccaaattagatttacgtgaagacaaacaatatttgagtgatcatccaaatgttacagccatcacaacttctcagggtgaagaactgaagaaaagtattggtgcagcagtgtacattgagtgtagctccaaaactcaacagaatgtgaaggctgtttttgatgctgcgattagagttgttttacaaccaccaaagctgaagaaaaagcgaagcaagcaacgactatgtgtctatctatag

SEQ ID NO: 439 - protein, 198 aa, Zinnia elegans
MAAAATRFIKCVTVGDGAVGKTCMLISYTSNTFPTDYVPTVFDNFSANVVVGDSTVNLGLWDTAGQEDYNRLRPLSYRGADVFLLAFSLISRPSYENISKKWISELRHYAPDVPIVLVGTKLDLREDKQYLSDHPNVTAITTSQGEELKKSIGAAVYIECSSKTQQNVKAVFDAAIRVVLQPPKLKKKRSKQRLCVYL

SEQ ID NO: 440 - DNA, 600 bp, Penicillium marneffei
  CDS (1)..(600)
atggcgtctgggcctgcgactcaatcgttgaagtgtgtggtgaccggtgatggtgctgtcggcaagacatgtctcctgatatcatacaccaccaatgcctttcccggcgaatacattcccaccgtattcgacaactactccgctagtgtcatggtcgacggcaggcccatcagcctcggactctgggatacagctggtcaagaggattatgaccgtctccgccccttatcctaccctcaaaccgacgtcttcttgatctgcttctctatcgtctctccaccatcctttgacaacgtaaaagccaagtggtttcccgaaatcgagcaccatgcacccggcgtgcccatcattcttgtcggcacaaagcttgatttgagagaagatagagctaccgctgaggcgctgcgagccaaaaagatggagccggtgtcgtatgagcaggcgcttgcagttgcaaaggagattagggcgcataagtatctggagtgttcggccttgacccagaggaatttgaagagcgtgtttgatgaagctattcgggccgtcctcaatcctcgccctcaacccaagaacaaggcaaaacgatgcactattctgtaa

SEQ ID NO: 441 - protein, 199 aa, Penicillium marneffei
MASGPATQSLKCVVTGDGAVGKTCLLISYTTNAFPGEYIPTVFDNYSASVMVDGRPISLGLWDTAGQEDYDRLRPLSYPQTDVFLICFSIVSPPSFDNVKAKWFPEIEHHAPGVPIILVGTKLDLREDRATAEALRAKKMEPVSYEQALAVAKEIRAHKYLECSALTQRNLKSVFDEAIRAVLNPRPQPKNKAKRCTIL

SEQ ID NO: 442 - DNA, 582 bp, Ustilago maydis
  CDS (1)..(582)
atgcagaccatcaagtgtgtagtcgtcggagacggtgccgtcggaaagacgtgtcttcttatctcgtatacaaccaacgccttcccgggcgaatacatccccacagtgtttgacaactattcggcaaacgtcatggtcgacggtaaacccgtctctctcggtctctgggatactgcgggtcaagaagactacgaccggttaagaccgctctcgtacccgcaaaccgacgtgttcctcgtgtgcttttcactggtgagtccaccttcgttcgaaaacgttcgaaccaagtggtggcccgaagtgtcgcatcacgctcccaacattcccaccatcctcgtgggaaccaagttggatctgcgcgaggatccagaaacgattgccaagctgcgcgatcgcaggatgcagcctatcacgtatgcgcagggcaatcagatggcgagggacattcacgctaccaagtatttggagtgctctgcactcacccagaagggattgaagggcgtatttgatgaagcgatcaggagcgttttggctcctgcaccagtccagagtaagaagaaaaacaactgtttgattctttaa

SEQ ID NO: 443 - protein, 193 aa, Ustilago maydis
MQTIKCVVVGDGAVGKTCLLISYTTNAFPGEYIPTVFDNYSANVMVDGKPVSLGLWDTAGQEDYDRLRPLSYPQTDVFLVCFSLVSPPSFENVRTKWWPEVSHHAPNIPTILVGTKLDLREDPETIAKLRDRRMQPITYAQGNQMARDIHATKYLECSALTQKGLKGVFDEAIRSVLAPAPVQSKKKNNCLIL

SEQ ID NO: 444 - DNA, 645 bp, Ustilago maydis
  CDS (1)..(645)
atggcaccggcagcaatttgtaggaagcttgtaattgtcggcgacggtgcttgcggcaagacgagtttgctttgcgtttttgccattggcgagttcccgcaagagtatgaacccaccattttcgaaaactacgtcgccgagatccgccttgatggcaagcctgtccagctggcgctatgggacaccgcgggtcaggaagaatacgagcgtcttcgtccactctcctactcacaagcacacgtcatcttgatcgcctttgccatcgatacacccgactcgctcgaaaacgtgcaagtcaagtggatggaggaggtacgtcaaatatgcggcccctcagtgcctgtgctcctggtaggctgcaagaaggatcttcgcgaaaatgccatcgctaagggcaagccggttcagggtcactatgtaaagagacaacaggctaaactggtagcagcacagatcggcgctcgatcgtatcacgaatgctcatcactcaacaaccaaggcgtcgacgccgtgttcgaagccgcgacgcgcgcggccatgcttgtgcgcaattccggtgcttcttcaggaggcgccatctcgcagagcaagaccaaggaggcattacacaacgatgctggctcttgcaaatgtatcgtcctctag

SEQ ID NO: 445 - protein, 214 aa, Ustilago maydis
MAPAAICRKLVIVGDGACGKTSLLCVFAIGEFPQEYEPTIFENYVAEIRLDGKPVQLALWDTAGQEEYERLRPLSYSQAHVILIAFAIDTPDSLENVQVKWMEEVRQICGPSVPVLLVGCKKDLRENAIAKGKPVQGHYVKRQQAKLVAAQIGARSYHECSSLNNQGVDAVFEAATRAAMLVRNSGASSGGAISQSKTKEALHNDAGSCKCIVL

SEQ ID NO: 446 - DNA, 594 bp, Hordeum vulgare
  CDS (1)..(594)
atgagcgcgtccaggttcataaagtgcgtcaccgtgggggacggcgccgtcggcaagacctgcatgctcatctcctacacctccaacaccttccccaccgactatgtgcccacggtgtttgacaacttcagtgctaatgttgtggttgatggcaacactgtcaaccttgggctatgggatactgcaggtcaggaagactacaacagactgagaccgctgagttatcgtggagctgatgtcttccttctggccttctcgcttatcagcaaggctagctatgagaatgtttcaaagaagtggatacctgaactgaagcattatgcaccaggtgtgcctattatcctcgtgggaacaaagcttgatcttcgagatgacaagcagttctttgtggaccatcctggtgctgttcctatcactactgctcagggggaggaactaaaaaagttaataggcgcaccctactacatcgaatgcagctcgaagacccaactaaatgtcaagggtgtatttgatgcggcaataaaggtggtactgcagccaccaaaggcaaagaagaagaaaaaggcgcagaggggggcttgctccatcttgtga

SEQ ID NO: 447 - protein, 197 aa, Hordeum vulgare
MSASRFIKCVTVGDGAVGKTCMLISYTSNTFPTDYVPTVFDNFSANVVVDGNTVNLGLWDTAGQEDYNRLRPLSYRGADVFLLAFSLISKASYENVSKKWIPELKHYAPGVPIILVGTKLDLRDDKQFFVDHPGAVPITTAQGEELKKLIGAPYYIECSSKTQLNVKGVFDAAIKVVLQPPKAKKKKKAQRGACSIL

SEQ ID NO: 448 - DNA, 594 bp, Medicago truncatula
  CDS (1)..(594)
atgagtgcttctaggtttattaaatgtgttactgttggtgatggagctgttggcaaaacttgtttgttgatttcttacaccagcaatactttccccacggattatgtgccgacagtttttgacaatttcagtgcgaatgtggttgttaatggaagtattgtgaatctgggtttgtgggatactgctggacaagaggattataacagattaagacctttgagttaccgtggtgccgatgttttcatattggctttctctctcataagcaaagccagttatgaaaatgtctccaaaaagtggattccagagttgaagcattatgcacctggtgtccccataattctggttggaacaaagcttgatcttcgggatgataagcagttctgcatagaccatcctggtgccgttcccattaccacagctcagggagaagagctgaggaagctgattaatgcaccagcttacattgaatgcagttcaaaatcacaggagaacgtgaaggcggtgtttgatgcagccataagagttgtccttcaaccaccaaagcagaagaaaaagaagaataaagcacaaaaggcctgttcaatattgtaa

SEQ ID NO: 449 - protein, 197 aa, Medicago truncatula
MSASRFIKCVTVGDGAVGKTCLLISYTSNTFPTDYVPTVFDNFSANVVVNGSIVNLGLWDTAGQEDYNRLRPLSYRGADVFILAFSLISKASYENVSKKWIPELKHYAPGVPIILVGTKLDLRDDKQFCIDHPGAVPITTAQGEELRKLINAPAYIECSSKSQENVKAVFDAAIRVVLQPPKQKKKKNKAQKACSIL

SEQ ID NO: 450 - DNA, 594 bp, Medicago truncatula
  CDS (1)..(594)
atgagcgcttctaggttcatcaagtgtgttactgttggggatggagctgttggtaaaacttgtttgttaatttcatacaccagcaataccttccccactgactatgtgccaactgtcttcgacaatttcagtgcaaatgtggttgtgaatggaagcactgtgaatctgggtttgtgggacactgcaggacaagaggattataacagattaagacctttgagttatcgtggtgccgatgttttcattctcgctttctccctcataagcaaggccagttatgaaaatgtttccaaaaagtggattccagagttgaagcattatgcacctggtgttcccattattctggttggcacaaagcttgaccttcgggatgacaagcagttcttcgtcgaccatcctggtgctgttcctattaccactgctcagggagaagagcttaggaagctgatcaatgcacctgcttatatcgaatgcagttcgaaatcacagcagaatgtgaaagcagtctttgatgcagccataagagttgtccttcaaccaccaaagcaaaagaaaaagaagagtaaagcaccaaaggcttgttcgatattgtga

SEQ ID NO: 451 - protein, 197 aa, Medicago truncatula
MSASRFIKCVTVGDGAVGKTCLLISYTSNTFPTDYVPTVFDNFSANVVVNGSTVNLGLWDTAGQEDYNRLRPLSYRGADVFILAFSLISKASYENVSKKWIPELKHYAPGVPIILVGTKLDLRDDKQFFVDHPGAVPITTAQGEELRKLINAPAYIECSSKSQQNVKAVFDAAIRVVLQPPKQKKKKSKAPKACSIL

SEQ ID NO: 452 - DNA, 594 bp, Medicago truncatula
  CDS (1)..(594)
atgagtggttccaggttcatcaagtgtgtcacagttggtgatggtgccgttggaaagacttgtttgcttatctcctacaccagcaacactttccctacggactatgtgccgactgtctttgacaatttcagtgcaaatgtagttgtggatgggagcactataaatctcgggttgtgggatactgctggccaagaagattacaatagattaagacccttaagctatcgtggagcagatgttttcctgcttgctttttctctcataagcaaggctagctatgaaaatattgccaaaaaatggattcctgagttgaggcattatgctcctggtgttccaattattctcgttggaacaaaacttgatcttcgggatgatagccagttctttcaagaccatcctggtgcggcgccaatcaccacagcacagggtgaggaactgagaaaacttatcggtgctccagtttacattgaatgtagttccaaaacacagaagaatgtgaaggctgtttttgattcggccatcaaagtagttctacagccaccaaagcaaaagaaaacaaagagaaaggggcaaaaagcctgttccattttgtga

SEQ ID NO: 453 - protein, 197 aa, Medicago truncatula
MSGSRFIKCVTVGDGAVGKTCLLISYTSNTFPTDYVPTVFDNFSANVVVDGSTINLGLWDTAGQEDYNRLRPLSYRGADVFLLAFSLISKASYENIAKKWIPELRHYAPGVPIILVGTKLDLRDDSQFFQDHPGAAPITTAQGEELRKLIGAPVYIECSSKTQKNVKAVFDSAIKVVLQPPKQKKTKRKGQKACSIL

SEQ ID NO: 454 - DNA, 573 bp, Anopheles gambiae
  CDS (1)..(573)
atgtcatccggaagacctatcaaatgtgtggtggtcggcgacggcacggtggggaagacgtgcatgttgatcagctacacgaccgacagctttcccggcgaatacgtacccacgagcttcgacaactactccgccccgatggtggtggacggtgtgcaagtgtcgctcgggctgtgggatacggccgggcaggaagactacgatcggctaaggcccctgtcctacccacagacggacgtgttcctcatatgctacagtgtggccagcccgtcgtcgttcgaaaacgttacctccaaatggtatcccgagatcaagcaccactgcccggatgcgcccatcattttagtcggaaccaaaatcgatctgcgcgaggatcgggaaacgataagcttgctggcggaccagggcctttccgcgctgaagcgcgaacagggccaaaagctagcgaacaagatacgggcggtaaagtatatggaatgttcggcactaacccagcggggcctaaagcaggtgtttgacgaagcgctttgcgccacggaagagaaagagcgaatgccggtagaagaggagtag

SEQ ID NO: 455 - protein, 190 aa, Anopheles gambiae
MSSGRPIKCVVVGDGTVGKTCMLISYTTDSFPGEYVPTSFDNYSAPMVVDGVQVSLGLWDTAGQEDYDRLRPLSYPQTDVFLICYSVASPSSFENVTSKWYPEIKHHCPDAPIILVGTKIDLREDRETISLLADQGLSALKREQGQKLANKIRAVKYMECSALTQRGLKQVFDEALCATEEKERMPVEEE

SEQ ID NO: 456 - DNA, 579 bp, Saccharomyces cerevisiae
  CDS (1)..(579)
atgtctgaaaaggccgttagaaggaaacttgttattattggtgatggtgcttgtggcaagacctctttactatatgtatttacattaggaaaattccctgaacaatatcatccgacagtgttcgagaattatgtcactgattgcagagttgacggaataaaagtgtccttaacgctctgggatacagcgggacaagaggaatatgaacgtttacgtccattctcatattcaaaagcagatataatattaattgggtttgctgtagacaattttgaatcactaattaacgcaaggacgaaatgggcggatgaggcattacgatattgtcctgacgcaccaatcgttcttgtaggcttgaaaaaagatttgaggcaagaagcccattttaaagagaatgctaccgatgaaatggttcccattgaagatgcaaaacaagttgcaagggccgttggggccaagaaatacatggaatgtagtgcactgactggtgagggtgtggatgatgtctttgaagtagctacaagaaccagtttgcttatgaagaaggaaccaggggctaactgttgcataattttataa

SEQ ID NO: 457 - protein, 192 aa, Saccharomyces cerevisiae
MSEKAVRRKLVIIGDGACGKTSLLYVFTLGKFPEQYHPTVFENYVTDCRVDGIKVSLTLWDTAGQEEYERLRPFSYSKADIILIGFAVDNFESLINARTKWADEALRYCPDAPIVLVGLKKDLRQEAHFKENATDEMVPIEDAKQVARAVGAKKYMECSALTGEGVDDVFEVATRTSLLMKKEPGANCCIIL

SEQ ID NO: 458 - DNA, 588 bp, Mucor rouxii
  CDS (1)..(588)
atggctgaaatcagacgaaaacttgtgattgttggagatggtgcttgtggtaaaacctgtttgttgattgtcttttcaaagggtacttttcctgagttctatgttcccaccgtttttgaaaattacgtagctgatgtcgaagtcgatggaaaacacgtggaattagctttatgggatacagcaggccaagaagattatgatcgtctccgtcccttgtcttaccctgattctcatgttatcttgatttgttttgctgttgattcacccgattcattggaaaacgttcaagagaagtggatctctgaagtactccacttctgtcaaggtttacctattgttttagttggttgtaagaaagatttaagaaatgatcctggaacaattgaagaacttagaagaaactctcaaaaacctgtcagttcagaagagggtgcttctattgctcaaagaattagtgcttacaagtaccttgaatgttctgccaagactggtgaaggtgtacgtgaagtatttgaacacgcaacaagagctgcattaatggtttctaagaagaaaaagtcaaagagtggtgtctgcaaccttttgtaa

SEQ ID NO: 459 - protein, 195 aa, Mucor rouxii
MAEIRRKLVIVGDGACGKTCLLIVFSKGTFPEFYVPTVFENYVADVEVDGKHVELALWDTAGQEDYDRLRPLSYPDSHVILICFAVDSPDSLENVQEKWISEVLHFCQGLPIVLVGCKKDLRNDPGTIEELRRNSQKPVSSEEGASIAQRISAYKYLECSAKTGEGVREVFEHATRAALMVSKKKKSKSGVCNLL

SEQ ID NO: 460 - DNA, 756 bp, Neurospora crassa
  CDS (1)..(756)
atgaccgagggcccggcctactccaagaaggtggtggtcgtgggcgatggcggttgcggaaagacatgtctcctgatcagttatagtcagggatacttcccagagaaatatgtcccaaccgtctttgagaactacatcacctacccaacgcatccaccgaccggtaagaccgtcgagctcgccctgtgggataccgccggccaagaggaatacgaccgcttgcgaccgctttcatacccagaaaccgaccttatttttgtctgcttcgccattgactgccccaactccctcgagaatgtcatggacaagtggtaccccgaagtcctccacttctgtccgtatacaccccttatcctcgtcggcctcaagtccgacctccgcaataagaagacgtgcatcgacatgctcaagacacaaggtctcacccccgtcaccaccgaacaaggactcgccgtcgctaagaagatgggcgctcagtacatggagtgctcatcaaaggagatgaagggtgtagaggagatttttgagcaggccatcctcacagtagtcgccaacgacaggaaaacactggaacaggaagccgcgaacggcatgctgggtgttggcgcgggctcgggaagcggaaagggcagcggaatctcgttcagcagtggtgacaaggccggttccgggatagggcccgtcaaggcggccggtgtgggtggcacgattgtcccgaaaacgaggaagaagaagagaaagtgtggtatgatgtga

SEQ ID NO: 461 - protein, 251 aa, Neurospora crassa
MTEGPAYSKKVVVVGDGGCGKTCLLISYSQGYFPEKYVPTVFENYITYPTHPPTGKTVELALWDTAGQEEYDRLRPLSYPETDLIFVCFAIDCPNSLENVMDKWYPEVLHFCPYTPLILVGLKSDLRNKKTCIDMLKTQGLTPVTTEQGLAVAKKMGAQYMECSSKEMKGVEEIFEQAILTVVANDRKTLEQEAANGMLGVGAGSGSGKGSGISFSSGDKAGSGIGPVKAAGVGGTIVPKTRKKKRKCGMM

SEQ ID NO: 462 - DNA, 594 bp, Nicotiana tabacum
  CDS (1)..(594)
atgagtgcttcgaggtttataaaatgtgtgacggtgggtgatggtgccgttggaaaaacgtgtctcttgatttcttacaccagcaacacctttcctacggattatgtgcctactgtgttcgataatttcagtgcaaatgtggtcgtcaatgggagtactgtcaacctagggttgtgggatacagctggacaggaggattacaataggttaagacctctgagttaccgtggagctgatgttttcatcttggcattctctctcattagtaaagccagctatgaaaatgtttccaagaagtggattcctgagttgaagcattatgctcccggtgttccaatagtgcttgttggaacaaaacttgatcttcgggatgataagcagttcttcatagaccatcctggtgctgtgccaattactactgctcagggcgaggagctgaggaaaacgattggggcccctgcttacattgaatgtagttcaaaaacacaacagaatgtgaaagcagtctttgatgctgctattaaggtcgtgctccagccacccaagcagaaaaaaaagaaggggaaggcccaaaaggcatgttcgattttgtga

SEQ ID NO: 463 - protein, 197 aa, Nicotiana tabacum
MSASRFIKCVTVGDGAVGKTCLLISYTSNTFPTDYVPTVFDNFSANVVVNGSTVNLGLWDTAGQEDYNRLRPLSYRGADVFILAFSLISKASYENVSKKWIPELKHYAPGVPIVLVGTKLDLRDDKQFFIDHPGAVPITTAQGEELRKTIGAPAYIECSSKTQQNVKAVFDAAIKVVLQPPKQKKKKGKAQKACSIL

SEQ ID NO: 464 - DNA, 579 bp, Blumeria graminis
  CDS (1)..(579)
atggctgaaattcgcagaaaactagttatcgttggtgatggagcttgtggaaagacttgtttactgattgtcttctccaagggcacatttccagaggtctatgtgccaactgtcttcgaaaactacgtcgcagatgtcgaggtggacggaaaacacgtcgaacttgcgctttgggatacggctggtcaagaggattatgaccgcctgagaccactttcatatccagactcccatgtcatccttatttgttttgccgttgattccccggattctctcgataacgttcaggagaagtggatctcagaagtattgcatttctgttgtggtctccccataattcttgtcggctgcaagaaagacttgcgtcatgaacaaaagacacttgaggagcttcacaaaaccagtcaaaagccagtgaccccagaacaaggcgaagaagtccgaaagaaaataggagcttacaagtatcttgagtgttccgccaaaaccaatgaaggtgtccgtgaggtattcgaacatgccacgcgcgcagcactcttaaccaagaaaaagaaggagaagagatgcattatcttgtaa

SEQ ID NO: 465 - protein, 192 aa, Blumeria graminis
MAEIRRKLVIVGDGACGKTCLLIVFSKGTFPEVYVPTVFENYVADVEVDGKHVELALWDTAGQEDYDRLRPLSYPDSHVILICFAVDSPDSLDNVQEKWISEVLHFCCGLPIILVGCKKDLRHEQKTLEELHKTSQKPVTPEQGEEVRKKIGAYKYLECSAKTNEGVREVFEHATRAALLTKKKKEKRCIIL

SEQ ID NO: 466 - DNA, 579 bp, Penicillium marneffei
  CDS (1)..(579)
atggttgtggctacaattaaatgtgtcgtcgttggtgacggtgcggtcggaaagacttgcttattgatttcgtatacgacaaataaatttccatcggaatatgttcctactgttttcgataattatgccgtgactgtcatgatcggcgatgagccttataccctcggcctcttcgataccgccggacaagaagattacgaccgcctgcgccctctctcctaccctcaaaccgatgtcttccttgtctgcttctccgtcacttccccagcctcatttgagaacgtgcgagagaaatggtttccagaagtccatcatcactgtcccggtgttccctgcctgattgtcggcacccagaccgatttgcgagatgatcctgcggtgcgcgagaagctggcgaaacagaagatgcagcccgtgcgtaaggaggatggtgatcggatggcaaaggagttgggtgccgtcaagtacgtggaatgttcagctttgacgcagtataagctgaaggatgtttttgatgaggctatcgttgctgctctcgaacccgccccaaagaagagacccaagtgcgttgttctataa

SEQ ID NO: 467 - protein, 192 aa, Penicillium marneffei
MVVATIKCVVVGDGAVGKTCLLISYTTNKFPSEYVPTVFDNYAVTVMIGDEPYTLGLFDTAGQEDYDRLRPLSYPQTDVFLVCFSVTSPASFENVREKWFPEVHHHCPGVPCLIVGTQTDLRDDPAVREKLAKQKMQPVRKEDGDRMAKELGAVKYVECSALTQYKLKDVFDEAIVAALEPAPKKRPKCVVL

SEQ ID NO: 468 - DNA, 624 bp, Trichoderma reesei
  CDS (1)..(624)
atgcctctctgcggcggctccaagacggtgcagcgcaagctggttcttctgggcgatggtgccagcggaaagacgtcgctgctcaacgtcttcacaagaggttactttcccaccgtctacgaacctaccgtctttgaaaattacgtccacgacatctttgtcgacaacgtccacatcgagctctccctctgggatacggcgggacaggaggaattcgatcggctgcgatcgctctcctacgatgacaccgatttgatcgtgctctgttactcggtcgatagcaaagactcgctagaaaacgtcgaatccaaatgggtcggagagattgccgacaactgccccggcgtcaagctggtcctcgtcgccctcaagtgcgacctgcgccagcaagaggacgacgagcccgaggaccaggcagcggccgacggcaacgcacagcgcgagaaaccgcccacgatttcctacgacgagggccttgaggtcgccaagcggataggcgcctcgcgctacctggagtgctcggcgatgaagaaccgcggcgtcaacgaggcctttaccgaggcggcccgcgtagcgctaagcgtcaagaaggagagggaagacaacaagtgcacaatcatgtaa

SEQ ID NO: 469 - protein, 207 aa, Trichoderma reesei
MPLCGGSKTVQRKLVLLGDGASGKTSLLNVFTRGYFPTVYEPTVFENYVHDIFVDNVHIELSLWDTAGQEEFDRLRSLSYDDTDLIVLCYSVDSKDSLENVESKWVGEIADNCPGVKLVLVALKCDLRQQEDDEPEDQAAADGNAQREKPPTISYDEGLEVAKRIGASRYLECSAMKNRGVNEAFTEAARVALSVKKEREDNKCTIM

SEQ ID NO: 470 - DNA, 615 bp, Yarrowia lipolytica
  CDS (1)..(615)
atgccccaaccaacggatctgcgaagaaaactcgtcattgtcggcgacggagcctgcggcaagacctgtctgctgattgtcttcgcgaagggcaccttcccggaggtgtacgtgcccaccgtgtttgagaactacgtggccgacgtggagattgacggccgacgagtggagctggccctgtgggataccgccggccaggaggattacgaccgactgcgacccctgtcctaccccgacgccaacgtcatcatcatctgcttcgccatcgacagccccgactcgctcgacaacgtgcaggagaagtggatctccgaggtgctgcacttttgccagggcgtgcctattctgctggtcggttgcaaggtcgacctgcgaaacgaccccaagaccatcgaggagctgagaagaacgtcccagcgacccgtcacgaccgaggagggaaatgccgtggcccagaagattggcgccggcaagtacctggagtgctctgcccgaacccacgacggagtgagagaggtcttcgagcatgccacccgagctgccctgactgcccacggccagaagggctccaagagctccagcagagagggcaagaaaaagtgtttgattttgtaa

SEQ ID NO: 471 - protein, 204 aa, Yarrowia lipolytica
MPQPTDLRRKLVIVGDGACGKTCLLIVFAKGTFPEVYVPTVFENYVADVEIDGRRVELALWDTAGQEDYDRLRPLSYPDANVIIICFAIDSPDSLDNVQEKWISEVLHFCQGVPILLVGCKVDLRNDPKTIEELRRTSQRPVTTEEGNAVAQKIGAGKYLECSARTHDGVREVFEHATRAALTAHGQKGSKSSSREGKKKCLIL

SEQ ID NO: 472 - DNA, 639 bp, Tradescantia virginiana
  CDS (1)..(639)
atgtcttcaagtgtttcaaggttcatcaaatgtgttacagttggggatggagctgttggcgagacctgcatgcttatctgctacactagcaacaagtttcccactgattatgtaccaactgtgtttgataatttcagtgccaatgttattgtagagaacactactgtgaatttgggactctgggatactgctggccaagaagactacaataggttgaggccgctgagctacagaggagcagatgtttttgtcttggctttttcactggtaagccgtgccagctatgagaatgttctgaaaaagtggatacctgagcttcagcattatgctcctggagttcctttggttcttgttggcaccaagttggatcttcgtgaagataagcaatacttggcagatcatcctggcctgatgtctgtttctactgcccagggagaggaattgcgtaaacagatcggtgctgcttactacgttgagtgtagttcaaaaactcagcagaatgttaaggcagtgtttgatgctgccattaaggtagttatccagcctccgaagcataaagataagaagaagaaaaggccacgacatggatgttcaatattgaatatcttctgcgggagaaagctcgtctgttttaaatga

SEQ ID NO: 473 - protein, 212 aa, Tradescantia virginiana
MSSSVSRFIKCVTVGDGAVGETCMLICYTSNKFPTDYVPTVFDNFSANVIVENTTVNLGLWDTAGQEDYNRLRPLSYRGADVFVLAFSLVSRASYENVLKKWIPELQHYAPGVPLVLVGTKLDLREDKQYLADHPGLMSVSTAQGEELRKQIGAAYYVECSSKTQQNVKAVFDAAIKVVIQPPKHKDKKKKRPRHGCSILNIFCGRKLVCFK

SEQ ID NO: 474 - DNA, 585 bp, Suillus bovinus
  CDS (1)..(585)
atgcacaacatcaaatgtgttgtagtcggcgatggtgctgttggcaagacgtgtcttctcatctcttataccacaaatgcctttccaggagaatacgtgccaacagtattcgacaactactctgcaaatgtgatggtcgacgggaaaactatctctctcggtctatgggataccgctggacaagaagattacgatcgtctccggccactctcctaccctcaaacagatgtctttttgatctgtttctcgctcgtcagtccacctagctacgagaacgttagaaccaagtggtggcctgagatttcacatcatgcgccatctacttcggtggtcttggttggcactaaactggatttgcgtgaagatcctgctaccatcgagaaactccgtgaccggcgtatgcagcctatccagtacacgcaaggggtctcgatggcgagggatattggcgccgtcaagtatcttgaatgttctgcgctatcgcaaaagggcctaaagaccgtgtttgatgaggttatccgtgctgttttgaaccctcccccgaaggaaaagaagcgcagtggtcgtggttgtgttatcgtatga

SEQ ID NO: 475 - protein, 194 aa, Suillus bovinus
MHNIKCVVVGDGAVGKTCLLISYTTNAFPGEYVPTVFDNYSANVMVDGKTISLGLWDTAGQEDYDRLRPLSYPQTDVFLICFSLVSPPSYENVRTKWWPEISHHAPSTSVVLVGTKLDLREDPATIEKLRDRRMQPIQYTQGVSMARDIGAVKYLECSALSQKGLKTVFDEVIRAVLNPPPKEKKRSGRGCVIV

SEQ ID NO: 476 - DNA, 576 bp, Yarrowia lipolytica
  CDS (1)..(576)
atgcagaccataaaatgtgttgttgtcggcgatggtgccgtcggaaagacttgtctcctcatctcatacacaacaaacaagttcccctctgaatacgttcccaccgtttttgacaactatgccgtgactgtcatgattggagacgagccctacacactcggactgttcgacaccgccggtcaggaggattacgaccgactgcgacctctttgttaccctcagaccgatgttttcctcgtctgcttttccgtcacctctcccgcctcctttgagaacgtcaaggagaagtggttccctgaggtccaccaccactgccccggcgtgccttgcctcattgttggtacccaggttgatccgcgaagtgacaggatgattcttgacaagctttcccgacacaagctgcgacccatgaccactgagcaaggctaccagctcgcccgagaactcggtgccgtcaagtacgtcgagtgttctgcccttactcagaagggtctcaaggacgttttcgacgaggccatcgtggcagctcttgagcctccagtggtcaagaagaacaaaaagtgcattgtgctctag

SEQ ID NO: 477 - protein, 191 aa, Yarrowia lipolytica
MQTIKCVVVGDGAVGKTCLLISYTTNKFPSEYVPTVFDNYAVTVMIGDEPYTLGLFDTAGQEDYDRLRPLCYPQTDVFLVCFSVTSPASFENVKEKWFPEVHHHCPGVPCLIVGTQVDPRSDRMILDKLSRHKLRPMTTEQGYQLARELGAVKYVECSALTQKGLKDVFDEAIVAALEPPVVKKNKKCIVL

SEQ ID NO: 478 - DNA, 594 bp, Nicotiana tabacum
  CDS (1)..(594)
atgagtgcttcaaggtttatcaagtgtgttacggtgggtgatggtgctgttggcaaaacttgtcttttgatttcatacaccagcaatactttccctacggattacgtgcccactgtgttcgacaatttcagtgcaaatgtggttgtcaatgggagcactgtcaacctagggttgtgggatactgccggacaggaggattacaataggttaagacctctgagttaccgtggagccgatgtcttcattttggcattctctctcattagtaaagccagctatgagaatgtatccaagaagtggattcctgagttgaagcactatgctcctggtgtcccaatagttcttgttggaacaaaacttgatcttcgggatgataagcaattcttcatagaccaccccggtgctgtgccaattactactgctcagggtgaggagctaaggaaaactattggtgcacctgcttacatcgaatgtagttcaaaaacccaacagaatgtgaaagcagtctttgatgcagccattaaggtcgtcctccagccgcctaaaacaaagaaaaagaaggggaaatcacaaaagtcctgctcgatattgtga

SEQ ID NO: 479 - protein, 197 aa, Nicotiana tabacum
MSASRFIKCVTVGDGAVGKTCLLISYTSNTFPTDYVPTVFDNFSANVVVNGSTVNLGLWDTAGQEDYNRLRPLSYRGADVFILAFSLISKASYENVSKKWIPELKHYAPGVPIVLVGTKLDLRDDKQFFIDHPGAVPITTAQGEELRKTIGAPAYIECSSKTQQNVKAVFDAAIKVVLQPPKTKKKKGKSQKSCSIL

SEQ ID NO: 480 - DNA, 594 bp, Medicago sativa
  CDS (1)..(594)
  misc_feature (232)..(232): k is g or t
  misc_feature (328)..(328): n is a, g, c or t
atgagtgcttctaggtttattaaatgtgttactgttggtgatggagctgttggaaaaacttgtttgttgatttcttacaccagcaatactttccccacggattatgtgccgacagtttttgacaatttcagtgcgaatgtggttgttaatggaagtattgtgaatctgggtttgtgggatactgctgggcaagaggattataacagattaagacctttgagttaccgtggtkccgatgttttcatattggctttctctctcataagcaaagccagttatgaaaatgtctccaaaaagtggattccagagttgaagcattatgcacctngtgtccccataattctggttggaacaaagcttgaccttcgggatgataagcagttctgcatagaccatcctggtgccgttcccattaccacagctcagggagaagagctgaggaagctgattaatgcaccagcttacattgaatgcagttcaaaatcacaggagaacgtgaaggcggtgtttgacgcagccataagagttgtccttcaaccaccaaagcagaagaaaaagaagaataaagcacaaaaggcctgttcaatattgtaa

SEQ ID NO: 481 - protein, 197 aa, Medicago sativa
  misc_feature (78)..(78): The Xaa at location 78 stands for Ala, or Ser.
  misc_feature (110)..(110): The Xaa at location 110 stands for Arg, Cys, Gly, or Ser.
MSASRFIKCVTVGDGAVGKTCLLISYTSNTFPTDYVPTVFDNFSANVVVNGSIVNLGLWDTAGQEDYNRLRPLSYRGXDVFILAFSLISKASYENVSKKWIPELKHYAPXVPIILVGTKLDLRDDKQFCIDHPGAVPITTAQGEELRKLINAPAYIECSSKSQENVKAVFDAAIRVVLQPPKQKKKKNKAQKACSIL

SEQ ID NO: 482 - DNA, 597 bp, Gossypium hirsutum
  CDS (1)..(597)
atgagtgcttccaggttcataaaatgcgtcacggtcggtgacggtgccgtcggcaagacttgtctgctcatttcctacactagcaatactttccctaccgattatgtgccaactgtctttgacaactttagtgctaatgtggttgtggatgggaacactgttaatctgggattgtgggatactgctggacaggaagattacaatagattaagaccattgagctatcgtggagcagatgtcttcttgctggcattttctctcattagcaaagctagctatgaaaatgttgctaagaaatggattccagaattgagacattatgcacccggtgttccaattattcttgttgggactaagcttgatcttcgagaagataagcagttcttcatagatcaccctggtgcggtgcccattaccacagcacagggtgaggaattgagaaagctaattggagcgcatttttacattgagtgtagttcaaaaacacaacagaatgtgaaagcggtctttgatgcggccatcaaagtagttctccagcctccaaagaagaagaagaaaaagaagagaaaggcacaaaaagcttgctcaatattgtga

SEQ ID NO: 483 - protein, 198 aa, Gossypium hirsutum
MSASRFIKCVTVGDGAVGKTCLLISYTSNTFPTDYVPTVFDNFSANVVVDGNTVNLGLWDTAGQEDYNRLRPLSYRGADVFLLAFSLISKASYENVAKKWIPELRHYAPGVPIILVGTKLDLREDKQFFIDHPGAVPITTAQGEELRKLIGAHFYIECSSKTQQNVKAVFDAAIKVVLQPPKKKKKKKRKAQKACSIL

SEQ ID NO: 484 - DNA, 594 bp, Cicer arietinum
  CDS (1)..(594)
atgagtgggtccaggttcattaagtgtgttaccgtaggtgacggtgccgtaggcaagacttgtttgcttatctcctacaccagcaacactttccctacggactatgtgcctactgtctttgataatttcagtgcaaatgtagttgtggatgggagcactataaatctgggtttgtgggatactgctggccaagaagattacaatagattaagacccttaagctatcgtggagcggatgttttcctgcttgctttctcactcataagcagggccagctatgaaaatatcgccaagaaatggattcctgagttgaggcattatgctcctggtgttccaattattctcgttggaacaaaacttgatcttcgggatgataagcaattctttcaagaccatcctggtgcggtgccaatcaccacagcacagggtgaggaactgagaaagcttattggtgctccagtttacattgaatgtagttccaaaacacaaaagaatgtgaaggctgtttttgatgcggccatcaaagtagttctacagccgccaaagcaaaagaaaactaagagaaaggggcaaaaagcctgttccattttgtga

SEQ ID NO: 485 - protein, 197 aa, Cicer arietinum
MSGSRFIKCVTVGDGAVGKTCLLISYTSNTFPTDYVPTVFDNFSANVVVDGSTINLGLWDTAGQEDYNRLRPLSYRGADVFLLAFSLISRASYENIAKKWIPELRHYAPGVPIILVGTKLDLRDDKQFFQDHPGAVPITTAQGEELRKLIGAPVYIECSSKTQKNVKAVFDAAIKVVLQPPKQKKTKRKGQKACSIL

SEQ ID NO: 486 - DNA, 573 bp, Drosophila melanogaster
  CDS (1)..(573)
atgacggcgaacataacgaagagtccgcgcccgctgaaaataaccatcgtgggcgatggcatggtgggcaaaacctgcatgctgataacctacacacggaacgagttccccgaggagtacatacccacagtgttcgacaatcacgcctgcaacatagccgtagatgatcgggactacaatctgaccctctgggacactgccggccaggaggattacgaaaggctgcgccccctgagctatcccagtaccaactgcttcctgttgtgctattcgatcagcagtaggacctcattcgaaaacgtgaaaagcaagtggtggccggagatccgtcacttctccgcccacgttcccgtggttctcgtgggcaccaaactggacttgcgcattcccagctcggagaagttcgtgaccacacaggagggaaaaaagatgcgcaaagagatacacgcattcaacttggtcgagtgctccgccaagaagaagcagaacctgcagcaggtcttcgaggaggcggttagagccgtggagaggaaaccaaagacgacgtccaagcaatcgtgcaaaatactgtga

SEQ ID NO: 487 - protein, 190 aa, Drosophila melanogaster
MTANITKSPRPLKITIVGDGMVGKTCMLITYTRNEFPEEYIPTVFDNHACNIAVDDRDYNLTLWDTAGQEDYERLRPLSYPSTNCFLLCYSISSRTSFENVKSKWWPEIRHFSAHVPVVLVGTKLDLRIPSSEKFVTTQEGKKMRKEIHAFNLVECSAKKKQNLQQVFEEAVRAVERKPKTTSKQSCKIL

SEQ ID NO: 488 - DNA, 582 bp, Exophiala dermatitidis
  CDS (1)..(582)
atggttgtcgcaacgatcaagtgtgtggttgtcggtgacggcgcggtcggcaagacatgcttgcttatctcgtacaccaccaacaagttcccttcggaatatgtcccgaccgtctttgacaattacgccgtcacggtgatgatcggagatgagccatacactcttggtctatttgatacagcaggacaagaggattacgaccggcttcgacctttgtcatacccgcagaccgatgtctttctcgtctgtttctccgtcacttcgccagcatcgtttgagaacgtgcgagagaaatggtttcccgaggtccaccaccactgtcccggtgtgccatgtctgatcgtcggaactcagaccgatctacgtgacgacccacaagtccgtgagaaactcgccaaacagaagatgcaacccgttcgtaaggaggatggtgaaagaatggccaaggagttgggcgcggtcaaatacgtcgaatgcagtgctctcacccagtacaaactcaaggacgtctttgatgaggcaatcgttgctgctctcgagcctccaccaaagaagagtagtaagaaatgcacgattctttga

SEQ ID NO: 489 - protein, 193 aa, Exophiala dermatitidis
MVVATIKCVVVGDGAVGKTCLLISYTTNKFPSEYVPTVFDNYAVTVMIGDEPYTLGLFDTAGQEDYDRLRPLSYPQTDVFLVCFSVTSPASFENVREKWFPEVHHHCPGVPCLIVGTQTDLRDDPQVREKLAKQKMQPVRKEDGERMAKELGAVKYVECSALTQYKLKDVFDEAIVAALEPPPKKSSKKCTIL

SEQ ID NO: 490 - DNA, 597 bp, Nicotiana tabacum
  CDS (1)..(597)
atgagtgcgtctaggttcataaagtgtgtcaccgttggcgacggagctgtgggtaaaacttgtcttctcatttcctataccagcaacacatttcccactgattacgtcccaactgtattcgacaattttagtgcaaatgtggttgtcgatgggagcactgtcaatctggggctgtgggatactgcaggtcaggaggattacaatagattaagaccgttgagctaccggggggcagatgtatttatactggcattttctctcattagcaaagcgagctatgaaaatgtctccaaaaagtggattcctgaattgaggcattatgctcctggagttccaattattcttgttggaacaaagctagatctccgagaggataagcaattcttcctggaccatccaggtgctgttccacttaccacagctcagggtgaagagctgagaaagtcgattggtgcttccgcttacattgaatgtagtgcaaaaacacaacagaatgtgaaggctgtttttgatgctgccattaaggtggttctacaaccacccaaacaaaagaagaaaaagaagagaaagggtcaaaaagcctgctctatcttgtga

SEQ ID NO: 491 - protein, 198 aa, Nicotiana tabacum
MSASRFIKCVTVGDGAVGKTCLLISYTSNTFPTDYVPTVFDNFSANVVVDGSTVNLGLWDTAGQEDYNRLRPLSYRGADVFILAFSLISKASYENVSKKWIPELRHYAPGVPIILVGTKLDLREDKQFFLDHPGAVPLTTAQGEELRKSIGASAYIECSAKTQQNVKAVFDAAIKVVLQPPKQKKKKKRKGQKACSIL

SEQ ID NO: 492 - DNA, 576 bp, Aedes aegypti
  CDS (1)..(576)
atgcaaacgataaagtgcgtcgtggtgggcgacggtgccgtcggtaagacctgcctgctcatctcctacacgaccaacaaatttccctcggagtacgtgccgaccgtcttcgacaactatgccgtcacggtcatgatcggcggagagccatacacgctgggactgttcgatactgccggtcaggaggattacgatcggttgaggccactgtcctatccgcagacagacgtgttcctggtgtgcttctccgtcgtcagtcccagttcgtttgagaacgtcaaagaaaagtgggtaccggagataacgcaccactgtcagaagacgccgttcctgctcgtcgggacgcagatcgatctgcgcgacgagcagagcacgctggagaagctggccaagaacaaacagaaaccgatcacgctggagcagggcgagaagctggccaaggaactgaaggcggtcaagtacgtcgagtgctcggcgctgacgcagaaagggctcaagaacgtgttcgacgaggcgatcctggccgcgctggaacccccagagccaaccaaaaagcgaaagtgcaagtttctgtaa

SEQ ID NO: 493 - protein, 191 aa, Aedes aegypti
MQTIKCVVVGDGAVGKTCLLISYTTNKFPSEYVPTVFDNYAVTVMIGGEPYTLGLFDTAGQEDYDRLRPLSYPQTDVFLVCFSVVSPSSFENVKEKWVPEITHHCQKTPFLLVGTQIDLRDEQSTLEKLAKNKQKPITLEQGEKLAKELKAVKYVECSALTQKGLKNVFDEAILAALEPPEPTKKRKCKFL

SEQ ID NO: 494 - DNA, 620 bp, Anopheles gambiae
  CDS (45)..(620)
agggttgcagcagtagcagcagcagcagcagcagcagcagcagaatgcaaacaataaagtgcgtggtcgttggtgacggtgcggtcggtaagacctgcctgctcatttcctacacgaccaacaaatttccatccgagtacgtaccgaccgtgttcgacaactacgccgtcacggtcatgatcggtggcgaaccctacacgctcggtttgtttgacacagctggccaggaagattacgatcgactacgaccactgtcgtatccacagaccgatgtatttttagtgtgcttttccgtcgtgagtcccagttcgttcgaaaacgttaaagaaaagtgggtaccagaaataacgcaccattgccagaaaacgccgttcctgctggtgggcacgcagatcgatctgcgcgacgaaaacagcacactggagaagctggctaagaacaaacaaaaacccatcaccctcgagcagggtgagaagctggcgaaggaactgaaggcggtgaagtatgtcgagtgttcggcgttgacccagaaagggctgaagaacgtgttcgacgaggcaatcctggcggcgctggaacccccagagccgacgaaaaagaggaagtgccgatttttgtaa

SEQ ID NO: 495 - protein, 191 aa, Anopheles gambiae
MQTIKCVVVGDGAVGKTCLLISYTTNKFPSEYVPTVFDNYAVTVMIGGEPYTLGLFDTAGQEDYDRLRPLSYPQTDVFLVCFSVVSPSSFENVKEKWVPEITHHCQKTPFLLVGTQIDLRDENSTLEKLAKNKQKPITLEQGEKLAKELKAVKYVECSALTQKGLKNVFDEAILAALEPPEPTKKRKCRFL

SEQ ID NO: 496 - DNA, 576 bp, Drosophila melanogaster
  CDS (1)..(576)
atgcaaaccatcaagtgcgtggtcgtcggcgacggagccgtgggtaagacatgcctgctcatctcgtatacaaccaacaagttcccgtcggagtacgtgcccacggtgttcgacaactatgcggtcactgtgatgatcggcggtgagccctacacactgggcctgttcgatacggccggacaggaggattacgatcggctgcgtccgctctcctatccgcagacggatgtcttccttgtctgcttttcggtggtcagtcccagttccttcgagaacgtcaaggagaagtgggtgcccgagattacacaccattgccaaaagacgccgttcctgctggtgggcacacagattgatttgcgcgacgagaacagcacgctggagaagctggccaagaacaagcagaagcccatcaccatggagcagggcgagaagctggccaaggagctgaaggccgtcaagtacgtggagtgctcggccttgacacagaagggcctgaaaaatgtattcgacgaggccatcctggccgccctcgagccaccagagcccacaaagaaaaggaagtgcaaattcttataa

SEQ ID NO: 497 - protein, 191 aa, Drosophila melanogaster
MQTIKCVVVGDGAVGKTCLLISYTTNKFPSEYVPTVFDNYAVTVMIGGEPYTLGLFDTAGQEDYDRLRPLSYPQTDVFLVCFSVVSPSSFENVKEKWVPEITHHCQKTPFLLVGTQIDLRDENSTLEKLAKNKQKPITMEQGEKLAKELKAVKYVECSALTQKGLKNVFDEAILAALEPPEPTKKRKCKFL

SEQ ID NO: 498 - DNA, 579 bp, Schizosaccharomyces pombe
  CDS (1)..(579)
atgcccaccattaagtgtgtcgtagtaggagacggtgctgtaggaaagacctgtctgcttatttcctatactacaaacaagtttcctagtgactatgtgccaactgtattcgataattatgctgtcactgtcatgatcggtgatgaaccatacactcttggtttattcgataccgctggtcaggaggattatgatcgcttgcgtcctttatcctatcctcaaacagacgtctttttggtttgttttagtgtaacttctcctgccagttttgaaaatgtgaaagaaaagtggtttcccgaagttcatcatcattgtccgggcgtcccgtgcttaattgttggtacccaaattgatttacgtgatgacccttctgtgcaacagaaactagctcgccagcatcagcatccccttacacatgagcaaggtgaacgattagctcgtgagttgggtgctgtcaagtatgttgagtgttccgctttgacccaaaaagggttaaagaatgtttttgatgaagctattgtagccgctcttgatcctcctgttcctcacaagaaaaagtcaaagtgtttggtactgtaa

SEQ ID NO: 499 - protein, 192 aa, Schizosaccharomyces pombe
MPTIKCVVVGDGAVGKTCLLISYTTNKFPSDYVPTVFDNYAVTVMIGDEPYTLGLFDTAGQEDYDRLRPLSYPQTDVFLVCFSVTSPASFENVKEKWFPEVHHHCPGVPCLIVGTQIDLRDDPSVQQKLARQHQHPLTHEQGERLARELGAVKYVECSALTQKGLKNVFDEAIVAALDPPVPHKKKSKCLVL

SEQ ID NO: 500 - DNA, 648 bp, Arabidopsis thaliana
  CDS (1)..(648)
atggcttcaagtgcttcaaagttcatcaagtgtgtgactgttggtgatggtgctgttggtaaaacctgtatgctcatctgctacaccagcaataaattccccactgactacataccaacagtttttgacaactttagtgcaaatgttgttgttgaaggcaccactgtcaatttggggctttgggacactgctgggcaagaagactataacagattaaggcctttaagttacaggggagcagatgttttcgtcttgtctttctcattagtcagccgagctagctacgagaatgtttttaaaaagtggatccctgaactccaacactttgctccaggagttccccttgtccttgttggtaccaaattagatcttcgtgaagataagcattatttggctgatcatcctggactatcccctgtaactactgcacagggagaggagttgcgtaagctaattggtgcgacgtattacattgagtgtagttcaaaaactcaacagaatgtgaaagcagtttttgattctgcgataaaggaagtgatcaaacctctggttaaacaaaaggagaagactaagaagaagaagaagcaaaagtcgaatcacggctgtttatcaaatgttctgtgtgggaggatagtgactcggcattga

SEQ ID NO: 501 - protein, 215 aa, Arabidopsis thaliana
MASSASKFIKCVTVGDGAVGKTCMLICYTSNKFPTDYIPTVFDNFSANVVVEGTTVNLGLWDTAGQEDYNRLRPLSYRGADVFVLSFSLVSRASYENVFKKWIPELQHFAPGVPLVLVGTKLDLREDKHYLADHPGLSPVTTAQGEELRKLIGATYYIECSSKTQQNVKAVFDSAIKEVIKPLVKQKEKTKKKKKQKSNHGCLSNVLCGRIVTRH

SEQ ID NO: 502 - DNA, 594 bp, Arabidopsis thaliana
  CDS (1)..(594)
atgagcgcttcgaggttcgtaaagtgcgtgacggttggtgatggagctgtcggaaaaacttgtttgttgatttcttacacaagcaacactttccctacggattatgtgcctaccgttttcgataatttcagtgccaatgttgtggttaatggaagcactgtgaatcttggattgtgggacactgcagggcaagaggattacaatagattaagaccactgagttaccgtggagcagatgttttcattttggccttctctcttatcagtaaagccagttatgaaaacgtctccaaaaagtggatcccggagttgaaacattacgcgcctggtgtccccatcgtccttgttggaacaaagcttgatcttcgagatgataaacagttctttatcgaccatcctggtgctgttccgattactactgctcagggagaggagctgaggaagcaaataggagcacctacttacatcgaatgcagttccaaaactcaagagaatgtgaaggcggtgtttgacgcagccatccgagtggtgttgcaaccgccaaagcagaagaagaagaagagcaaagcgcagaaggcatgctccattctatga

SEQ ID NO: 503 - protein, 197 aa, Arabidopsis thaliana
MSASRFVKCVTVGDGAVGKTCLLISYTSNTFPTDYVPTVFDNFSANVVVNGSTVNLGLWDTAGQEDYNRLRPLSYRGADVFILAFSLISKASYENVSKKWIPELKHYAPGVPIVLVGTKLDLRDDKQFFIDHPGAVPITTAQGEELRKQIGAPTYIECSSKTQENVKAVFDAAIRVVLQPPKQKKKKSKAQKACSIL

SEQ ID NO: 504 - DNA, 591 bp, Gossypium hirsutum
  CDS (1)..(591)
atgagcactgcaagatttatcaagtgtgtcacggtcggtgatggagctgtggggaaaacttgtatgctcatttcatataccagcaatactttcccaacggattatgttccaacagtatttgataactttagtgccaatgtggtggtggatggcagcacagtgaaccttggcctatgggacactgccgggcaagaagattataataggctaaggccactgagttatagaggagctgatgtgtttttgttggccttttctcttataagcaaggccagttatgaaaacatctacaaaaagtggatcccagagctaagacattatgctcataatgtaccagttgtgcttgttggaaccaaactagatttgcgagatgacaagcagttcctcattgatcaccctggagcaacaccaatatcaacatctcagggagaagaactaaagaagatgataggagcagttacttatatagaatgcagctccaaaacccaacagaatgtgaaggctgttttcgatgctgcaataaaagtagctttgaggccaccaaaaccaaagagaaagccttgcaaaaggagaacatgtgctttcctttga

SEQ ID NO: 505 - protein, 196 aa, Gossypium hirsutum
MSTARFIKCVTVGDGAVGKTCMLISYTSNTFPTDYVPTVFDNFSANVVVDGSTVNLGLWDTAGQEDYNRLRPLSYRGADVFLLAFSLISKASYENIYKKWIPELRHYAHNVPVVLVGTKLDLRDDKQFLIDHPGATPISTSQGEELKKMIGAVTYIECSSKTQQNVKAVFDAAIKVALRPPKPKRKPCKRRTCAFL

SEQ ID NO: 506 - DNA, 594 bp, Arabidopsis thaliana
  CDS (1)..(594)
atgagcgcttcgaggttcataaagtgtgtcaccgttggcgacggagctgttggtaaaacctgtttgctgatttcttacaccagcaacacttttcctacggattatgtaccgactgttttcgataactttagcgcaaatgtggttgttaatggagccactgtgaatctgggcctatgggataccgcagggcaggaggattataacagattaagacctttgagttaccgcggtgctgatgttttcatcttagcattctctcttatcagtaaggctagttatgagaatgtctccaagaagtggatcccagagctgaagcattatgcccctggtgtccctatagttcttgttggaaccaaactagatcttcgggatgacaaacagttcttcattgaccaccctggcgctgtaccaattactactgctcagggagaggaactgaagaaactaattggagctcccgcatacatcgagtgcagttcaaaaacacaagagaacgtgaaaggagtatttgatgcagcgatccgagtggttcttcaacctccaaagcagaagaaaaagaaaagcaaagcacaaaaagcctgctccattttgtaa

SEQ ID NO: 507 - protein, 197 aa, Arabidopsis thaliana
MSASRFIKCVTVGDGAVGKTCLLISYTSNTFPTDYVPTVFDNFSANVVVNGATVNLGLWDTAGQEDYNRLRPLSYRGADVFILAFSLISKASYENVSKKWIPELKHYAPGVPIVLVGTKLDLRDDKQFFIDHPGAVPITTAQGEELKKLIGAPAYIECSSKTQENVKGVFDAAIRVVLQPPKQKKKKSKAQKACSIL

SEQ ID NO: 508 - DNA, 594 bp, Beta vulgaris
  CDS (1)..(594)
atgagtgcttcgaggttcataaaatgtgttacagttggtgatggtgccgttggtaaaacttgcttgttgatttcttacaccagcaacacctttcctacggactacgtgcccactgtttttgacaatttcagtgccaatgtcgtcgttaacggggccacagttaatctgggattatgggatactgcaggacaagaggattataacagattaagacctttgagttatcgtggagcagatgtttttattctcgctttctcccttattagcaaggctagttatgaaaatgtttctaagaagtggattcctgagttgaagcattatgctcctggtgtccccattgttcttgttggaacaaagctcgatcttcgggatgacaagcagttttttatcgaccaccctggtgcagttccaatcactacagctcagggagaggaattaaggaaactgattggggctcctgcttacatcgaatgcagttcaaaaacacagcagaatgtcaaggcagtttttgatgcagccattaaggtcgtgcttcaaccaccaaagacaaagaaaaagaagtcaaaggcacagaaggcttgctccatattgtaa

SEQ ID NO: 509 - protein, 197 aa, Beta vulgaris
MSASRFIKCVTVGDGAVGKTCLLISYTSNTFPTDYVPTVFDNFSANVVVNGATVNLGLWDTAGQEDYNRLRPLSYRGADVFILAFSLISKASYENVSKKWIPELKHYAPGVPIVLVGTKLDLRDDKQFFIDHPGAVPITTAQGEELRKLIGAPAYIECSSKTQQNVKAVFDAAIKVVLQPPKTKKKKSKAQKACSIL

SEQ ID NO: 510 - DNA, 579 bp, Drosophila melanogaster
  CDS (1)..(579)
atgcaggcgatcaagtgcgtcgtcgtgggcgacggagccgtgggaaagacctgcctgctgatcagctacacgaccaatgcctttcccggcgagtacatacccaccgtgttcgacaactactcggccaacgtgatggtggacgccaagcccatcaacctgggcctgtgggatacggccgggcaggaggactacgaccgactgaggccactgtcttatccccagaccgatgtcttcctcatctgcttctcgctggtgaatccggcatcgttcgagaacgtgcgggccaagtggtatccggaggtgcgccaccactgccccagcacgcccatcatcctggtgggcaccaagctggatttgcgcgacgacaagaacacaatcgaaaagctgagggacaagaaactggcgcccatcacctatccgcagggcctggccatggccaaggaaatcggagcggtcaagtatctggagtgctcggccctgacgcagaagggtctgaaaaccgttttcgacgaggccatccggtcggttttgtgccccgtgctgcagcccaagtccaagcgcaagtgcgccctgctctaa

SEQ ID NO: 511 - protein, 192 aa, Drosophila melanogaster
MQAIKCVVVGDGAVGKTCLLISYTTNAFPGEYIPTVFDNYSANVMVDAKPINLGLWDTAGQEDYDRLRPLSYPQTDVFLICFSLVNPASFENVRAKWYPEVRHHCPSTPIILVGTKLDLRDDKNTIEKLRDKKLAPITYPQGLAMAKEIGAVKYLECSALTQKGLKTVFDEAIRSVLCPVLQPKSKRKCALL

SEQ ID NO: 512 - DNA, 594 bp, Lotus japonicus
  CDS (1)..(594)
atgagtgcttccaggttcatcaagtgtgtcaccgtcggtgatggcgctgtgggcaaaacctgcttgttgatttcctacaccagcaacacttttcccacggactacgtgcccaccgtttttgacaatttcagtgctaatgttgttgtggatggaagcactgtaaacctaggtttatgggatactgctggtcaggaggattacaatagattaagacccttgagctaccgaggagctgatgtctttatactggcattttctcttatcagcaaggccagctatgaaaatattgcaaagaagtggatccctgaactgaggcattacgcacccggtgttccaataattctagttggaacgaagttagatcttcgggatgataaacactttttggcagaccaccctggtgcagtaccaattactacagcacagggagaagaattgagaaagctgattggagctcctgcctacatcgagtgtagttcgaaaacacagcagaatgtgaaagccgtctttgacgctgccatcaaagtggttctgcaaccgccaaagcaaaagaaaaagaagagggaggcacagaagtcctgctcaatattgtga

SEQ ID NO: 513 - protein, 197 aa, Lotus japonicus
MSASRFIKCVTVGDGAVGKTCLLISYTSNTFPTDYVPTVFDNFSANVVVDGSTVNLGLWDTAGQEDYNRLRPLSYRGADVFILAFSLISKASYENIAKKWIPELRHYAPGVPIILVGTKLDLRDDKHFLADHPGAVPITTAQGEELRKLIGAPAYIECSSKTQQNVKAVFDAAIKVVLQPPKQKKKKREAQKSCSIL

SEQ ID NO: 514 - DNA, 606 bp, Arabidopsis thaliana
  CDS (1)..(606)
atgagcacagcaagattcattaagtgtgtgactgtcggagatggagcagtgggaaagacttgtatgctcatttcatataccagcaatacgtttcctacggattatgttccaacagttttcgacaacttcagcgcaaatgtggtggtcgacgggagtaccgtgaaccttggcctgtgggatactgccggtcaggaagattataataggcttaggcctttgagttacagaggagcagatgtcttcttattagcattttcccttataagcaaggccagttacgagaatattcacaaaaagtggcttccggagctgaaacattatgctcctggcatccccattgtgctcgtcggaacaaaattagatttgagggatgacaagcagttcttgaaggatcatccaggagcagcttctataacaactgctcagggagaagaattaaggaaaatgattggagctgttaggtacttagagtgcagctccaaaacccaacagaatgtgaaggcagtgtttgatacagcgataagggtagctttgaggccaccaaaggcaaagaaaaagataaaaccattgaagactaagagatcaagaatatgctttttcctataa

SEQ ID NO: 515 - protein, 201 aa, Arabidopsis thaliana
MSTARFIKCVTVGDGAVGKTCMLISYTSNTFPTDYVPTVFDNFSANVVVDGSTVNLGLWDTAGQEDYNRLRPLSYRGADVFLLAFSLISKASYENIHKKWLPELKHYAPGIPIVLVGTKLDLRDDKQFLKDHPGAASITTAQGEELRKMIGAVRYLECSSKTQQNVKAVFDTAIRVALRPPKAKKKIKPLKTKRSRICFFL

SEQ ID NO: 516 - DNA, 579 bp, Drosophila melanogaster
  CDS (1)..(579)
atgcaggccatcaagtgtgtggttgtgggcgacggagcggtgggaaagacctgtctgctgatcagctatacgaccaacgccttccccggcgagtacatacccacggtgttcgacaactattcggcgaatgtgatggtggatgccaagcccatcaatctgggcctctgggatacggctggacaggaggactacgatcgcctgaggccgctatcctatccgcaaacggatgtctttctcatctgtttctcactggtgaatccggcatcgtttgagaatgtgcgagccaaatggtttcccgaggtgcgtcatcattgcccgagtgtgccgataatcctggtcggcaccaaactggatctgcgcgacgataagcagacgatcgagaagctgaaggacaagaagctaacaccgatcacctatccccaaggactggcgatggccaaggaaatagctgcggtcaagtatctggagtgctcggccctgacccaaaagggtctgaagacggtcttcgacgaggccatacgatccgtgctatgtcctgtcgttcgaggacccaagcggcacaagtgcgccctgctctaa

SEQ ID NO: 517 - protein, 192 aa, Drosophila melanogaster
MQAIKCVVVGDGAVGKTCLLISYTTNAFPGEYIPTVFDNYSANVMVDAKPINLGLWDTAGQEDYDRLRPLSYPQTDVFLICFSLVNPASFENVRAKWFPEVRHHCPSVPIILVGTKLDLRDDKQTIEKLKDKKLTPITYPQGLAMAKEIAAVKYLECSALTQKGLKTVFDEAIRSVLCPVVRGPKRHKCALL

SEQ ID NO: 518 - DNA, 591 bp, Lotus japonicus
  CDS (1)..(591)
atgagcacagctagattcatcaagtgtgttactgttggagatggagcagtgggaaagacctgtatgcttatctcttacaccagcaacacattcccaacggattatgtgcctactgtttttgataacttcagtgcaaatgtggtggttgatggcagcacagttaacctgggattatgggacactgctggacaggaggattacaataggcttaggcctttgagctacagaggagcagatgtgttcttgctggctttttccctccttagcagagccagctatgaaaatatctccaaaaagtggattcctgaactgagacactatgccccaactgtgccaattgttcttgtgggaaccaaacttgatttgagggaagacaggcagtatttgattgatcatcctggagccacacctattactactgcccagggagaagagctgaagaaggcaattggtgctgctgtgtacctagaatgcagctcaaagactcaacagaatgtgaaggctgtgtttgatgctgctatcaaggttgttttgcagccacctaaaccaaagaaaaaacgaaagaagaccagaccatgcgttttcctttaa

SEQ ID NO: 519 - protein, 196 aa, Lotus japonicus
MSTARFIKCVTVGDGAVGKTCMLISYTSNTFPTDYVPTVFDNFSANVVVDGSTVNLGLWDTAGQEDYNRLRPLSYRGADVFLLAFSLLSRASYENISKKWIPELRHYAPTVPIVLVGTKLDLREDRQYLIDHPGATPITTAQGEELKKAIGAAVYLECSSKTQQNVKAVFDAAIKVVLQPPKPKKKRKKTRPCVFL

SEQ ID NO: 520 - DNA, 597 bp, Arabidopsis thaliana
  CDS (1)..(597)
atgagtgcttcaaggtttatcaagtgtgtcactgtcggcgacggtgctgttggaaagacttgtcttctcatctcctacactagcaacactttccccacggattatgtgccaactgtgttcgataatttcagtgccaatgtgattgttgatggcaacactatcaacttgggattgtgggatactgcagggcaagaggactacaatagactaagacctttgagctatcgcggtgcagatgtcttcttacttgcattctcacttgtcagcaaagctagctatgaaaatgtttctaaaaagtgggttcctgaactgagacattatgctcctggtgttcccatcatcctcgttggaacaaagcttgatcttcgagatgataagcaattctttgccgagcaccctggtgctgtgcctatctctaccgctcagggtgaagaactaaagaagctgattggggcgcctgcttatatcgaatgcagtgcaaaaactcaacagaatgtgaaagcagtgtttgatgcggctatcaaggtcgttctccagccaccaaaaaacaagaagaagaagaagagaaaatctcagaaaggttgttctatactctga

SEQ ID NO: 521 - protein, 198 aa, Arabidopsis thaliana
MSASRFIKCVTVGDGAVGKTCLLISYTSNTFPTDYVPTVFDNFSANVIVDGNTINLGLWDTAGQEDYNRLRPLSYRGADVFLLAFSLVSKASYENVSKKWVPELRHYAPGVPIILVGTKLDLRDDKQFFAEHPGAVPISTAQGEELKKLIGAPAYIECSAKTQQNVKAVFDAAIKVVLQPPKNKKKKKRKSQKGCSIL

SEQ ID NO: 522 - DNA, 588 bp, Arabidopsis thaliana
  CDS (1)..(588)
atggcgtcaaggtttataaagtgtgtgaccgtcggagatggtgccgtcggaaaaacttgcatgctcatttcttacactagcaatacttttcctactgattatgtgccaactgttttcgacaacttcagtgctaatgtggttgttgatggcaacactgtcaatcttggattgtgggatactgctggtcaagaggactacaacaggttacgacctttgagttaccgtggtgctgatgttttcattcttgctttctctcttattagcaaggctagctatgagaatatagccaagaagtggattcctgagctcaggcattatgctcctggtgttcccattatccttgttgggacaaaactcgatcttcgagatgacaagcaattctttatagatcatcctggtgctgtgccaattactacaaaccagggagaggaactgaagaaactgattggatctgctgtctacattgaatgtagttcaaagacacagcagaacgtgaaggcagtgtttgatgcagctataaaagtggtgcttcagccaccaaagcagaagaagaagaaaaagaataagaaccgttgcgcgttcttgtga

SEQ ID NO: 523 - protein, 195 aa, Arabidopsis thaliana
MASRFIKCVTVGDGAVGKTCMLISYTSNTFPTDYVPTVFDNFSANVVVDGNTVNLGLWDTAGQEDYNRLRPLSYRGADVFILAFSLISKASYENIAKKWIPELRHYAPGVPIILVGTKLDLRDDKQFFIDHPGAVPITTNQGEELKKLIGSAVYIECSSKTQQNVKAVFDAAIKVVLQPPKQKKKKKNKNRCAFL

SEQ ID NO: 524 - DNA, 591 bp, Arabidopsis thaliana
  CDS (1)..(591)
atgagtgcttcgaggtttataaagtgtgtcaccgtcggcgatggtgccgtcggaaaaacttgtatgctgatttcttacacaagcaacactttccctacggactatgttccaactgttttcgacaacttcagtgctaatgtggttgtagatgggaacacggtgaatcttggattgtgggatacagctggtcaagaagactataacaggttaagaccgttgagttaccgtggtgccgatgtcttcattcttgcattctcgcttattagcaaagctagctacgagaatgtagccaagaagtggattcctgagcttaggcattatgcccctggtgttcctataatcctcgttggaacgaaactcgatcttcgagatgacaagcaattcttcatagaccatcctggtgcagtgcctattactacaaaccagggagaggaactaaagaaactgataggatcaccaatctacattgaatgtagttcaaagactcagcagaatgtgaaagcagtctttgacgcagccataaaagtggtgcttcagccaccgaaacagaagaagaagaaaaagaacaagaaccgctgcgtgttcttgtga

SEQ ID NO: 525 - protein, 196 aa, Arabidopsis thaliana
MSASRFIKCVTVGDGAVGKTCMLISYTSNTFPTDYVPTVFDNFSANVVVDGNTVNLGLWDTAGQEDYNRLRPLSYRGADVFILAFSLISKASYENVAKKWIPELRHYAPGVPIILVGTKLDLRDDKQFFIDHPGAVPITTNQGEELKKLIGSPIYIECSSKTQQNVKAVFDAAIKVVLQPPKQKKKKKNKNRCVFL

SEQ ID NO: 526 - DNA, 594 bp, Arabidopsis thaliana
  CDS (1)..(594)
atgagcgcatcaaggttcataaagtgcgtcaccgttggtgatggagctgttggtaaaacctgtttgctgatttcttataccagcaacacctttcccacggattatgttccgactgttttcgataactttagtgcaaatgtggttgttaatggagccacggtgaatcttggattgtgggatactgcagggcaagaggactataacagattaagacctttgagttaccgtggtgctgatgttttcattcttgccttctctctcattagtaaggctagttatgagaatgtttccaagaagtggattcctgagttgaagcactatgctcctggtgtcccaattgtccttgttggaaccaaactagatcttcgagatgacaaacagtttttcatcgaccatcctggtgctgtccctattaccactgttcagggagaggagctgaagaagctaattggagcgccagcttacatcgagtgcagttcaaaatcacaagagaacgtgaagggcgtgtttgatgcagcgatcagagtggtccttcaacctccaaagcagaagaaaaagaagaacaaagcacaaaaggcctgctccatcttgtaa

SEQ ID NO: 527 - protein, 197 aa, Arabidopsis thaliana
MSASRFIKCVTVGDGAVGKTCLLISYTSNTFPTDYVPTVFDNFSANVVVNGATVNLGLWDTAGQEDYNRLRPLSYRGADVFILAFSLISKASYENVSKKWIPELKHYAPGVPIVLVGTKLDLRDDKQFFIDHPGAVPITTVQGEELKKLIGAPAYIECSSKSQENVKGVFDAAIRVVLQPPKQKKKKNKAQKACSIL

SEQ ID NO: 528 - DNA, 630 bp, Arabidopsis thaliana
  CDS (1)..(630)
atgagtgcttcgaagttcataaaatgtgttactgttggagatggggctgttgggaagacatgtatgcttatctgttacactagcaacaagtttcctactgattatataccgactgtgttcgacaatttcagtgccaatgtagctgtggatggacaaatcgttaatttagggctatgggacactgccggtcaagaagattacagtaggttaagaccattgagttatagaggagctgatatcttcgtcttagccttttcgcttattagcaaggcgagttacgaaaatgtactcaagaagtggatgcctgaacttcgtcggtttgcgccaaatgttcccatagttcttgttggtacaaagctagatctccgggatgacaagggatacctcgcggatcacaccaatgtcattacctctactcagggagaggaattgaggaagcaaattggtgcagctgcttatattgagtgtagttccaagactcaacaaaatgtgaaagcagtgtttgatacagcgatcaaggtggttcttcagcctccaaggaggaaagaggtcccgaggaggaggaagaatcatagaagatccggttgctccattgcgagtattgtctgtggaggttgcaccgctgcttaa

SEQ ID NO: 529 - protein, 209 aa, Arabidopsis thaliana
MSASKFIKCVTVGDGAVGKTCMLICYTSNKFPTDYIPTVFDNFSANVAVDGQIVNLGLWDTAGQEDYSRLRPLSYRGADIFVLAFSLISKASYENVLKKWMPELRRFAPNVPIVLVGTKLDLRDDKGYLADHTNVITSTQGEELRKQIGAAAYIECSSKTQQNVKAVFDTAIKVVLQPPRRKEVPRRRKNHRRSGCSIASIVCGGCTAA

SEQ ID NO: 530 - DNA, 627 bp, Arabidopsis thaliana
  CDS (1)..(627)
atggcttcgagtgcttcaaaattcatcaaatgtgtgactgttggagatggtgccgttggaaaaacttgtatgctcatctgctacactagcaacaaattccctactgactacataccaacagtttttgacaactttagtgttaatgttgtggttgaaggcatcactgtgaacttaggcctttgggacactgccgggcaagaagactataacagactaaggcctttaagttacagaggagcagatgtttttgtgttggctttctcattgatcagccgagctagctatgagaatgtgtttaaaaagtggatccctgaactccaacactttgcaccaggagtccccattgtgcttgttggtaccaaaatggatcttcgtgaagatagacattacttgtctgatcatcctggactgtccccggtaactacatcacagggagaggaactccgcaagcatatcggagcgacttattacattgaatgtagctcaaaaactcaacagaatgtgaaagccgtatttgatgctgctattaaagtagtaattaaaccagcagtgaaacaaaaggagaagaagaagaagcagaagcctcgcagcggatgtctctcaaacattctgtgtgggaagaattga

SEQ ID NO: 531 - protein, 208 aa, Arabidopsis thaliana
MASSASKFIKCVTVGDGAVGKTCMLICYTSNKFPTDYIPTVFDNFSVNVVVEGITVNLGLWDTAGQEDYNRLRPLSYRGADVFVLAFSLISRASYENVFKKWIPELQHFAPGVPIVLVGTKMDLREDRHYLSDHPGLSPVTTSQGEELRKHIGATYYIECSSKTQQNVKAVFDAAIKVVIKPAVKQKEKKKKQKPRSGCLSNILCGKN

SEQ ID NO: 532 - DNA, 630 bp, Arabidopsis thaliana
  CDS (1)..(630)
atgtcagcttcaatggctgcaacatcaacatcatcagcaacagctacaacgtttataaagtgtgtcactgttggcgatggagctgtgggcaaaacttgtcttcttatttcctacaccagcaacacgttccccactgattatgttccaacagtgttcgacaatttcaatgctaatgttttagtcgatggtaaaactgtcaatctgggtctctgggatactgctggtcaagaagactacaatagggttagaccattgagttacagaggagcagatgttttcattcttgccttctcacttattagcaggcctagctttgagaacattgctaaaaagtgggtacccgagctgagacattatgccccgactgtgcctattgttcttgtgggaaccaaatcagatctaagagacaacatgcagttcccaaagaattatccaggtgcttgcacaatcttcccagaacagggtcaagaactaagaaaggaaataggagcattagcatacatagagtgcagctcaaaagcacaaatgaacgtaaaagccgtgtttgatgaagcgatcaaagtagttttacatcctccttcaaagactaagaagcgaaagagaaagatcggtttatgccatgttctttga

SEQ ID NO: 533 - protein, 209 aa, Arabidopsis thaliana
MSASMAATSTSSATATTFIKCVTVGDGAVGKTCLLISYTSNTFPTDYVPTVFDNFNANVLVDGKTVNLGLWDTAGQEDYNRVRPLSYRGADVFILAFSLISRPSFENIAKKWVPELRHYAPTVPIVLVGTKSDLRDNMQFPKNYPGACTIFPEQGQELRKEIGALAYIECSSKAQMNVKAVFDEAIKVVLHPPSKTKKRKRKIGLCHVL

SEQ ID NO: 534 - DNA, 591 bp, Gossypium hirsutum
  CDS (1)..(591)
atgaatacgtcgaggtttatcaagtgtgtcacagtaggtgatggagcagtggggaagacttgcatgcttatttcgtatactagcaatacgttcccaacggactatgttcccacagtgtttgacaactttagtgctaatgtggtggtggatggcagcacagtgaaccttggcctatgggatactgccggccaagaagattacaataggttaagacctttgagttataggggagctgatgtgtttttgttggccttttctcttattagcagggccagttatgaaaatgttcacaaaaagtggatccccgagcttagacattatgctcctaatgtgccaattgtgcttgttggaaccaaactagatttaagagatgacaagcaattcttgagtgataaccccggagcaatatcaataacaacatctcagggtgaggagttgaagaagatgataggtgcagttacttacattgagtgcagctccaaaacccaacagaatgtgaaggctgtttttgatgttgcaataaagatagcattgaggccaccaaaaccaaagagaaaacctataaaaagaagatcatgtgctttcctttga

SEQ ID NO: 535 - protein, 196 aa, Gossypium hirsutum
MNTSRFIKCVTVGDGAVGKTCMLISYTSNTFPTDYVPTVFDNFSANVVVDGSTVNLGLWDTAGQEDYNRLRPLSYRGADVFLLAFSLISRASYENVHKKWIPELRHYAPNVPIVLVGTKLDLRDDKQFLSDNPGAISITTSQGEELKKMIGAVTYIECSSKTQQNVKAVFDVAIKIALRPPKPKRKPIKRRSCAFL

SEQ ID NO: 536 - DNA, 624 bp, Ashbya gossypii
  CDS (1)..(624)
atgtctcagcaaatgcataaccccagtatcaggagaaaattggtgatcgtcggagatggtgcatgcgggaaaacatgtcttttgattgtgtttgccaagggaaagttcccacaggtgtatgttcctacggttttcgacaactacgttgcagatgtggaggtagacggcagacgggtggagcttgcgctttgggatacggctgggcaggaggattacgacaggctacggccgttatcgtacccagactccaatgttgtgttgatctgctactcgattgacctaccagactcgttggagaacgtgatggagaagtggatcagcgaggtgctatacttctgccagggtgttccgatcatcttggtggggtgcaaggctgacttgcggaacgatccgcaagtgatcgagcagttgagacagcagggacagcagcctgtctcgcaggctcaggcgcaggaggtagcggaccagatcggcgcggtagagtacattgagtgctctgcaaagaccggctttggtgtgcgcgaggtgtttgaggcggccacgcgtgcttccttgatggggaaacaaggcaagtctaaggcgaagtctgacaagaagaagaagaaaaagtgtgtggtcttgtag

SEQ ID NO: 537 - protein, 207 aa, Ashbya gossypii
MSQQMHNPSIRRKLVIVGDGACGKTCLLIVFAKGKFPQVYVPTVFDNYVADVEVDGRRVELALWDTAGQEDYDRLRPLSYPDSNVVLICYSIDLPDSLENVMEKWISEVLYFCQGVPIILVGCKADLRNDPQVIEQLRQQGQQPVSQAQAQEVADQIGAVEYIECSAKTGFGVREVFEAATRASLMGKQGKSKAKSDKKKKKKCVVL

SEQ ID NO: 538 - DNA, 597 bp, Candida albicans
  CDS (1)..(597): transl_table=12
atggttaacggtccagctgaacttcgtagaaaattagtcattgtcggtgatggtgcttgtggtaagacttgtttattaattgttttttcaaaaggtactttcccagaagtttatgtcccaacagtttttgaaaattacgttgctgatgttgaagttgatggtagaaaagttgaattggcattatgggatactgctggtcaagaagattatgatagattaagaccattatcttatccagattctaatgttattttgatttgtttttcagttgattcaccagattctttagataacgttttagaaaaatggatttctgaagttttacatttctgtcaaggtgttccaatcattttagttggttgtaaatctgatttaagagatgatcctcatactattgaagccttgagacaacaacaacaacaaccagtctcaacttctgaaggtcaacaagttgctcaaagaattggtgctgctgattacttggaatgttctgctaaaaccggtagaggtgttagagaagtgtttgaagctgctactagagcttctttaagagttaaagaaaagaaggaaaagaagaagaaatgtgttgtcttgtaa

SEQ ID NO: 539 - protein, 198 aa, Candida albicans
MVNGPAELRRKLVIVGDGACGKTCLLIVFSKGTFPEVYVPTVFENYVADVEVDGRKVELALWDTAGQEDYDRLRPLSYPDSNVILICFSVDSPDSLDNVLEKWISEVLHFCQGVPIILVGCKSDLRDDPHTIEALRQQQQQPVSTSEGQQVAQRIGAADYLECSAKTGRGVREVFEAATRASLRVKEKKEKKKKCVVL

SEQ ID NO: 540 - DNA, 579 bp, Drosophila melanogaster
  CDS (1)..(579)
atgacgacgattcgcaagaaattggtaattgtcggcgacggtgcctgcggtaaaacttgccttctgattgtcttcagcaaagatcagttccccgaggtctatgtgcccaccgtattcgagaattatgtggccgacatcgaggtggatggcaaacaggtggagctggccttgtgggatacggccgggcaggaggactacgacagactacgaccgctgagctatcccgacactgacgtcatactgatgtgtttctcagtggattcacccgattcgctagaaaatattcctgaaaaatggaccccagaggtcaaacacttttgtccaaatgttccaatcattttggtaggaaataagaaagatttgcgaaatgatcccaacacaattcgggatctagcaaaaatgaagcaggagccggtgaagccgcaggagggtcgcgccatggccgagaagattaatgcctttgcctatttggagtgttcggctaagtccaaggagggtgtgcgagatgttttcgagacggcaactagggccgcgctgcaagtcaaaaagaggaagaagaccagatgccttttgctctaa

SEQ ID NO: 541 - protein, 192 aa, Drosophila melanogaster
MTTIRKKLVIVGDGACGKTCLLIVFSKDQFPEVYVPTVFENYVADIEVDGKQVELALWDTAGQEDYDRLRPLSYPDTDVILMCFSVDSPDSLENIPEKWTPEVKHFCPNVPIILVGNKKDLRNDPNTIRDLAKMKQEPVKPQEGRAMAEKINAFAYLECSAKSKEGVRDVFETATRAALQVKKRKKTRCLLL

SEQ ID NO: 542 - DNA, 627 bp, Kluyveromyces lactis
  CDS (1)..(627)
atgtctcaagctgttggtaatgttgccagcattagaagaaagctagttattgtcggtgatggtgcgtgtggtaagacttgtttattgattgttttcgccaagggtaagttccctcaggtttacgtgcccactgttttcgataattacgttgctgatgtcgaagttgacggtcgtcgcgtagaattggcgttgtgggatactgctggccaagaagattatgatagattgagaccactttcgtacccagattccaacgttgtgttaatctgttactcaattgatttgccagattccttagaaaacgtgatggaaaaatggatctctgaagttttacacttttgtcaaggtgttccaatcatcttggttggttgtaaagcagatttgagaaatgatcctcaagttgttgaagaactaagagctcaaggattacaacctgtgtctcaggctcaagcacaagaagtcgctgaccaaatcggtgctgttgactacatcgaatgttctgccaagaccggttacggtgtcagagaagtcttcgaggctgctacaagagcttctttggtcggtaaacaaggtaagagcaaacctaagactaagtctagcaaaaaaaagaagtgtgtcgtcttgtaa

SEQ ID NO: 543 - protein, 208 aa, Kluyveromyces lactis
MSQAVGNVASIRRKLVIVGDGACGKTCLLIVFAKGKFPQVYVPTVFDNYVADVEVDGRRVELALWDTAGQEDYDRLRPLSYPDSNVVLICYSIDLPDSLENVMEKWISEVLHFCQGVPIILVGCKADLRNDPQVVEELRAQGLQPVSQAQAQEVADQIGAVDYIECSAKTGYGVREVFEAATRASLVGKQGKSKPKTKSSKKKKCVVL

SEQ ID NO: 544 - DNA, 594 bp, Pisum sativum
  CDS (1)..(594)
atgagcgcttctaggttcatcaagtgtgttactgttggggatggagctgtgggtaaaacgtgtttgctaatttcctacacaagcaataccttccctactgattacgtgccaactgtcttcgacaatttcagtgcaaatgtggttgtgaatggaagcaccgttaatctgggattgtgggatactgcaggacaagaggattataacagattaagacctttgagttatcgtggtgccgatgttttcattctggctttctccctcattagcaaggccagttatgaaaatgtttccaaaaagtggattccagagttaaagcattatgcacctggtgttcccattatactggttggcactaagcttgatcttcgggatgacaagcagttctttgttgaccatcctggtgctgtgcccattaccactgctcagggagaagagcttaggaagctgatcaatgcacctgcttatattgaatgcagttcgaaatcacagcagaatgtgaaagcagtgtttgatgcagccataagagttgtccttcaaccacctaagcaaaagaaaaagaagagtaaagcacaaaaggcctgttcgatattgtga

SEQ ID NO: 545 - protein, 197 aa, Pisum sativum
MSASRFIKCVTVGDGAVGKTCLLISYTSNTFPTDYVPTVFDNFSANVVVNGSTVNLGLWDTAGQEDYNRLRPLSYRGADVFILAFSLISKASYENVSKKWIPELKHYAPGVPIILVGTKLDLRDDKQFFVDHPGAVPITTAQGEELRKLINAPAYIECSSKSQQNVKAVFDAAIRVVLQPPKQKKKKSKAQKACSIL

SEQ ID NO: 546 - DNA, 609 bp, Schizosaccharomyces pombe
  CDS (1)..(609)
atggcgacagaacttcgcagaaagctcgttattgtgggagatggtgcatgtggtaaaacatgcttattaattgtattttctaaaggaacctttcccgaggtctatgttcccactgtttttgaaaattatgtagctgatgttgaggttgatggacgccacgttgagttggctctttgggatacggctggacaagaagattacgaccgtctacgtcccttgtcatatcctgactcacatgttatccttatttgctttgctgttgattctcccgattctcttgacaatgttcaagaaaaatggatttccgaggttctccatttctgttccagtcttcctattttgcttgtcgcttgcaaggctgatctccgtaacgacccaaaaattattgaggagttatccaagactaatcagcatcccgtcaccacagaagaaggtcaagcagtagctcagaagattggtgcttacaaataccttgagtgttctgccaagacgaatgaaggtgttcgtgaggtttttgaatcagccactcgtgctgctatgctcaaacacaagcccaaagtgaagccctctagtggaactaagaagaagaagcgttgtatcttgttgtaa

SEQ ID NO: 547 - protein, 202 aa, Schizosaccharomyces pombe
MATELRRKLVIVGDGACGKTCLLIVFSKGTFPEVYVPTVFENYVADVEVDGRHVELALWDTAGQEDYDRLRPLSYPDSHVILICFAVDSPDSLDNVQEKWISEVLHFCSSLPILLVACKADLRNDPKIIEELSKTNQHPVTTEEGQAVAQKIGAYKYLECSAKTNEGVREVFESATRAAMLKHKPKVKPSSGTKKKKRCILL

SEQ ID NO: 548 - DNA, 630 bp, Saccharomyces cerevisiae
  CDS (1)..(630)
atgtcacaacaagttggtaacagtatcagaagaaagctggtaatcgttggtgatggtgcctgtggtaagacatgtttattaatcgtcttttccaagggccaatttccagaagtctacgtaccaactgtctttgaaaactatgtagcagatgttgaagttgatgggcgtcgtgtagagctagcgctatgggataccgctggtcaagaagattatgatagactaagaccattgtcatacccagactccaatgtcgtattaatttgtttctctatcgatcttccagattctttagagaatgtacaagaaaaatggattgccgaagtattacatttctgtcaaggtgtgccaattattcttgttggttgtaaagtggatttgagaaacgacccacaaaccattgaacaattaagacaagaaggtcaacaacccgttacatcacaggagggacaatctgtagcagaccagattggcgcaaccggatactacgaatgttcggccaagactggttatggtgtcagagaagtgtttgaggccgccactagagcttcattgatgggtaaatctaaaacgaatggtaaagctaagaagaacactactgaaaagaagaagaagaagtgtgtcttgttatag

SEQ ID NO: 549 - protein, 209 aa, Saccharomyces cerevisiae
MSQQVGNSIRRKLVIVGDGACGKTCLLIVFSKGQFPEVYVPTVFENYVADVEVDGRRVELALWDTAGQEDYDRLRPLSYPDSNVVLICFSIDLPDSLENVQEKWIAEVLHFCQGVPIILVGCKVDLRNDPQTIEQLRQEGQQPVTSQEGQSVADQIGATGYYECSAKTGYGVREVFEAATRASLMGKSKTNGKAKKNTTEKKKKKCVLL

SEQ ID NO: 550 - DNA, 603 bp, Schizosaccharomyces pombe
  CDS (1)..(603)
atgttgcaatctcaaccgattagaaggaaactagtagttgtaggcgatggtgcctgcgggaagacgtctttgttatccgttttcactttgggatattttcctactgaatatgttccgactgtgtttgaaaactatgtttcagattgtcgagttgatggaaaatcagttcaactggcattgtgggataccgcaggtcaagaggaatatgagagattaagaccaatgtcttacgctaaagcacacattattttggttgggtttgcgatagactctcctgattcacttgaaaatgtttctacgaagtggattgaggaaattaatacactttgcccaaatgttccgtttattttagtgggcatgaaagccgacttaaggtcagatcccgttgctattgaagaaatgcgacgtcgaaatcaaaattttgtaaaatcacaacaggctgaattagtagctcagcggattggtgcgagaaagtatatggaatgttcttcattgactggtgacggcgtggacgatgtatttgaagctgctactagggcagcactaacagttcgggattcggaaaatgacaagagttctacaaaatgctgcatcatttcataa

SEQ ID NO: 551 - protein, 200 aa, Schizosaccharomyces pombe
MLQSQPIRRKLVVVGDGACGKTSLLSVFTLGYFPTEYVPTVFENYVSDCRVDGKSVQLALWDTAGQEEYERLRPMSYAKAHIILVGFAIDSPDSLENVSTKWIEEINTLCPNVPFILVGMKADLRSDPVAIEEMRRRNQNFVKSQQAELVAQRIGARKYMECSSLTGDGVDDVFEAATRAALTVRDSENDKSSTKCCIIS

SEQ ID NO: 552 - DNA, 675 bp, Ashbya gossypii
  CDS (1)..(675)
atgcctctgtgtgggtcgagctcgtcgtcgaagcatcctatcgagcgcaagatcgtcatcctcggagacggtgcttgcgggaagacgtcgctgttgaacgtgttcacgcgagggtactttccgaaggtgtacgagcccacggtattcgaaaactacatccatgacatcttcgtggacaaccagcacatcacgctgagcctgtgggacactgctgggcaggaggagtttgaccggttgcgatcgctgtcgtactcggacacacacacgattatgctgtgtttctcggtggactcgcgggactcgctggagaacgtcaagaacaagtgggtgagcgaaattgcggaccactgcgagggcgtgaagctggtgctagtggcgctgaagtgcgacttgcgcagcagcgacgagtacggcaacgagagcgccatcacgccggggtccatccagaaccagaagtacaacggcggcggcggcaacgggctgatcccctacgacgaggggctggcgatggccaagcagattggggcgctgcgctatctggagtgcagcgccaagatgaaccgtggcgtgaacgaggcgttcaccgaggctgcgcgctgcgcgctgactgcgacaccgaagggggcccgggactctgcgcccgaggccgaaagcagcagttgtactatcatgtga

SEQ ID NO: 553 - protein, 224 aa, Ashbya gossypii
MPLCGSSSSSKHPIERKIVILGDGACGKTSLLNVFTRGYFPKVYEPTVFENYIHDIFVDNQHITLSLWDTAGQEEFDRLRSLSYSDTHTIMLCFSVDSRDSLENVKNKWVSEIADHCEGVKLVLVALKCDLRSSDEYGNESAITPGSIQNQKYNGGGGNGLIPYDEGLAMAKQIGALRYLECSAKMNRGVNEAFTEAARCALTATPKGARDSAPEAESSSCTIM

SEQ ID NO: 554 - DNA, 621 bp, Schizophyllum commune
  CDS (1)..(621)
atggcgctctgcggttcgtcgaaagggcgcggcaggggccgaccgatccagcgcaaggtcgtcgtatgcggcgacggcgcgtgcgggaagacgagtctgctgaacgtcttcacgagggggttcttcacgcaggtttatgaaccgacggtgttcgagaactacgtgcacgatctgtatatcgacgaccagctggtggagctgagtctctgggatacggcggggcaggaggagttcgaccggctacggagcctgtcgtatgcagaaacgcatgtgatcatgatatgcttcagcgtcgacaatccaacgtcgctcgagaatgtggagagcaagtggctcgacgagattttggagtactgtccgggcgtgaagttggtattggtcgactcaaaatgtgatctacgcgacgaccctgcagtactcgatcggctacaacgatacggtacacatacggatcaatatgaagagggcctcggggtcgcgcgaagaatacgagcttcacgatacttagagtgctcctccaaacacaaccggggcgttaacgaagtcttcttacgaggccgcgcgcgtgtcactgtccactcgatcaggcaggggagcgccgggtcgtgttgtgtcatgtag

SEQ ID NO: 555 - protein, 206 aa, Schizophyllum commune
MALCGSSKGRGRGRPIQRKVVVCGDGACGKTSLLNVFTRGFFTQVYEPTVFENYVHDLYIDDQLVELSLWDTAGQEEFDRLRSLSYAETHVIMICFSVDNPTSLENVESKWLDEILEYCPGVKLVLVDSKCDLRDDPAVLDRLQRYGTHTDQYEEGLGVARRIRASRYLECSSKHNRGVNEVFLRGRARVTVHSIRQGSAGSCCVM

SEQ ID NO: 556 - DNA, 618 bp, Schizosaccharomyces pombe
  CDS (1)..(618)
atgtcaagctgtttcggaagtaaaaagaagcctatttatcggaaaatcgtaattcttggtgatggtgctgctggtaaaaccagtttgttaaatgtatttactaagggttatttccctcaggtatacgagcctactatatttgaaaactacattcatgatatctttgtcgatggaaacagtatagaactgtctctatgggatacagctggtcaagaagagtatgatcaactgcgttcgttatcatattcagatacacatgttattatgatctgctttgccgtggattcacgagactcattagaaaatgtaatcacaaaatggcttccggaagtctctagtaattgccctggtgttaaattggttcttgttgctctaaaatgtgatttacgtggagctgatgaggagcaagttgatcacagtaaaattattgattacgaggaaggactggcagcggcaaaaaaaatcaacgctgtacgatatttagaatgcagcgctaaattaaatcgtggcgtaaatgaagctttcacggaagctgcacgcgttgcccttgccgcgcaaccaagaggtacaaaggatggtgctgatgaatcccatggtaccggatgtatcattgcttga

SEQ ID NO: 557 - protein, 205 aa, Schizosaccharomyces pombe
MSSCFGSKKKPIYRKIVILGDGAAGKTSLLNVFTKGYFPQVYEPTIFENYIHDIFVDGNSIELSLWDTAGQEEYDQLRSLSYSDTHVIMICFAVDSRDSLENVITKWLPEVSSNCPGVKLVLVALKCDLRGADEEQVDHSKIIDYEEGLAAAKKINAVRYLECSAKLNRGVNEAFTEAARVALAAQPRGTKDGADESHGTGCIIA

SEQ ID NO: 558 - DNA, 696 bp, Saccharomyces cerevisiae
  CDS (1)..(696)
atgtcatttctatgtgggtcagcttcaacgtcaaataaaccgatcgaaagaaagatcgttattttgggcgacggtgcctgtggtaaaacttcgttgctgaatgttttcaccagaggttattttcccgaagtttatgagcctactgtttttgaaaactatatccatgatattttcgttgacagtaaacatatcacgctatcgttgtgggatactgcgggccaagaggaatttgacaggttacgatccttgtcttattcagatacgcaatgtataatgttatgtttcagtattgattcacgcgattctttagaaaatgtccaaaataaatgggtgggtgaaatcactgatcattgtgaaggcgtcaagttagtcttagttgcactaaagtgtgacttaagaaacaatgaaaatgaatctaacgcaatcacaccgaacaatatccaacaggataacagcgtttctaacgacaacggaaataacataaatagcacctcaaacggcaaaaacctgataagttatgaagaaggtctagctatggctaaaaagatcggtgcgctacgttatttggaatgtagcgctaagctgaataaaggtgtcaacgaagctttcacagaagccgcaagagttgctttaaccgcgggcccagtagcaaccgaagtgaaaagtgacagtggatccagctgtaccattatgtaa

SEQ ID NO: 559 - protein, 231 aa, Saccharomyces cerevisiae
MSFLCGSASTSNKPIERKIVILGDGACGKTSLLNVFTRGYFPEVYEPTVFENYIHDIFVDSKHITLSLWDTAGQEEFDRLRSLSYSDTQCIMLCFSIDSRDSLENVQNKWVGEITDHCEGVKLVLVALKCDLRNNENESNAITPNNIQQDNSVSNDNGNNINSTSNGKNLISYEEGLAMAKKIGALRYLECSAKLNKGVNEAFTEAARVALTAGPVATEVKSDSGSSCTIM

SEQ ID NO: 560 - DNA, 780 bp, Ashbya gossypii
  CDS (1)..(780)
atgagcgcagggccgttgcaagctgcgccaaagaagaattacggagcactgataggcgcggggccggcggtgggcggggcggcattcaaccggacgctgagcgaggttgcgagctacgagcgcagccggcgcgaccacgcgacgccggactaccggatcaagatcgtggtggtgggggacggcgcgacggggaagacgtctctgctgatgtcgtacacacagggccagttcccagaggactacgtgccgaccatcttcgagaactacgtgacgaacattgagggcccacgcgggaaggtgatcgagctggcgctgtgggacactgctgggcaggaggagtacagccggctgcggccgctgtcttacggggacgtggacatcgtgatggtgtgctacgcggcagacaaccgcacgtcgctgacgaacgcggaagagctgtggttcccggaggtgcgccacttctgcccgcacgcgccgatgatgctggtggggctcaagagcgacctgtactcgcttgatgcgctggaccggctcgtggacccgacggacgcggaactggtggcgcgcaagatgggcgccttcgtgcacctgcagtgctcggccaagacgcgacagtgcctggaggacgtgttcaacacggcgatacacacggcgctgtacgacgagctgcgcgcgcccccgcagcgcggggtgaagggcatgttcaagaagaagcagcagcgggacccgcaggcgcagtcttacaagcgggtgcgcaagcaccgctgtgtggtcctatag

SEQ ID NO: 561 - protein, 259 aa, Ashbya gossypii
MSAGPLQAAPKKNYGALIGAGPAVGGAAFNRTLSEVASYERSRRDHATPDYRIKIVVVGDGATGKTSLLMSYTQGQFPEDYVPTIFENYVTNIEGPRGKVIELALWDTAGQEEYSRLRPLSYGDVDIVMVCYAADNRTSLTNAEELWFPEVRHFCPHAPMMLVGLKSDLYSLDALDRLVDPTDAELVARKMGAFVHLQCSAKTRQCLEDVFNTAIHTALYDELRAPPQRGVKGMFKKKQQRDPQAQSYKRVRKHRCVVL

SEQ ID NO: 562 - DNA, 612 bp, Schizosaccharomyces pombe
  CDS (1)..(612)
atgtctgctttcaaaaagagtggatccaagtcagagacttcaaagaaacttgtggtcgtaggagatggcggttgtggaaagacatgtcttttaattgtattctcaagcggaacttttcccgagagatatgtgcctacagtgtttgaaaattatatcaccgatataacatatggaccgaacagcaaagttattgaacttgctttgtgggatactgctggtcaggaggaatatgatcgtttacgtcctctaagttacccgaatagcaacgttattttgttgtgtttctcaattgattgtccggcttctctgaataacgttacggagaagtggtatcctgaagttcaacacttttgccctagaactcccatcgttctcgtcgggctaaaagcggatttacgcaaagataggaatgctactgaagtactaagaacccagggtttaacaccagtaacctaccaacaagctcaatccgttgctttatcaatgaacgctccatatgtcgaatgctctgccaaagaaaacactggtgtaaatgaagtttttcaacttgctgttggcctcactataaaaaaatcattttcgttttctaaaaagtcttgcgtgattttataa

SEQ ID NO: 563 - protein, 203 aa, Schizosaccharomyces pombe
MSAFKKSGSKSETSKKLVVVGDGGCGKTCLLIVFSSGTFPERYVPTVFENYITDITYGPNSKVIELALWDTAGQEEYDRLRPLSYPNSNVILLCFSIDCPASLNNVTEKWYPEVQHFCPRTPIVLVGLKADLRKDRNATEVLRTQGLTPVTYQQAQSVALSMNAPYVECSAKENTGVNEVFQLAVGLTIKKSFSFSKKSCVIL

SEQ ID NO: 564 - DNA, 603 bp, Schizosaccharomyces pombe
  CDS (1)..(603)
atgactactgagctccgtcgtaaattggttattgttggcgatggtgcttgtggtaaaacatgcttgttgattgttttttccaaaggaacttttcctgaagtttacgtccctactgttttcgaaaattatgttgccgatgtcgaggttgatggaaggcatattgaattggcactatgggatacagctggtcaggaggattacgatcgtttacgccctctttcctatccagactctcacgtcgttttgatttgtttttcagttgatgctccagagagtttggacaatgttcaagaaaaatggatttctgaagttcttcacttctgctccaatttacccattttgctagttgggtgtaaagtggatttacgaaacgatccaaaaacaatcgaagagctctccaaaacctcacagaagcctatcacatttgaagaaggacaggtagtagctcaaaagattggcgcctataagtatctcgaatgttcagcgaaattgaacgaaggggtcaatgaggtttttgagactgcagctcgtgcttccatgcttaaatttaagcctgctagtgtaccgaagacaaaaaagaagaagcactgtatcttactctga

SEQ ID NO: 565 - protein, 200 aa, Schizosaccharomyces pombe
MTTELRRKLVIVGDGACGKTCLLIVFSKGTFPEVYVPTVFENYVADVEVDGRHIELALWDTAGQEDYDRLRPLSYPDSHVVLICFSVDAPESLDNVQEKWISEVLHFCSNLPILLVGCKVDLRNDPKTIEELSKTSQKPITFEEGQVVAQKIGAYKYLECSAKLNEGVNEVFETAARASMLKFKPASVPKTKKKKHCILL

SEQ ID NO: 566 - DNA, 582 bp, Emericella nidulans
  CDS (1)..(582)
atggctgagatccgccgcaagcttgttatcgttggtgatggtgcctgcggtaagacctgtctgttgatcgtcttctcaaagggcactttccctgaggtctacgtccccaccgtctttgagaactacgttgccgatgttgaggttgatggcaagcacgtcgagctcgctctctgggatacggctggtcaagaagattacgaccgtctccgccctctctcctaccctgactcgcatgtcatcctgatttgcttcgctgtcgactcaccggattcccttgacaacgttcaagagaagtggatctctgaagtcctacacttctgccagggtctccccatcatcctcgtcggatgcaagaaggatcttcgccatgaccccaagacgatcgaggagctgaacaagacctctcagaagcctgtcacccccgaacagggtgaggaagtccgcaagaagattggcgcctacaagtacctcgagtgctctgctcgaaccaacgagggtgtccgtgaggtctttgaggctgccacgcgtgctgccctcttgaccaagacccacaagagcaagaagaagtgcagcatcctgtaa

SEQ ID NO: 567 - protein, 193 aa, Emericella nidulans
MAEIRRKLVIVGDGACGKTCLLIVFSKGTFPEVYVPTVFENYVADVEVDGKHVELALWDTAGQEDYDRLRPLSYPDSHVILICFAVDSPDSLDNVQEKWISEVLHFCQGLPIILVGCKKDLRHDPKTIEELNKTSQKPVTPEQGEEVRKKIGAYKYLECSARTNEGVREVFEAATRAALLTKTHKSKKKCSIL

SEQ ID NO: 568 - DNA, 693 bp, Emericella nidulans
  CDS (1)..(693)
atgtccagtgggagggtatcggaagcgacaaatatcacccagccgccagcctattccaagaagttcgtggtggtgggagacggaggttgtgggaagacctgtctgttgattagttattcgcagggttactttccagaaaaatatgtcccgacggtatttgaaaactatatcacacaaacgcttcatagaaggtctgggaaaactgtggagttggcgctctgggatactgctggccaggaggaatacgaccgattgcgccctctctcatatcccgagaccgaccttctctttgtttgttttgctattgattgtcctgcatctcttgagaacgttatggataagtggtatcccgaggtgttgcatttctgccctacgaccccaattatcctcgttgggctgaaatcagacctgcgcaacaagcgaacgtgtatcgagctcctaaagacacaaggcttgacgcccgtcacgccggagcaaggtcaggcggtggccggccggatgaatgcatcgtatgtagagtgcagcagtaaggagatgcgaggtgtcgactctgtttttcaactggcagtggacactgtcgtgtccctcgaggagcaaaactgggacactcgcctaccgtcatcctccggaaaacctggtggcaagcccatcggtggtaagaagatcaagaagcgcagctgcaagattctgtga

SEQ ID NO: 569 - protein, 230 aa, Emericella nidulans
MSSGRVSEATNITQPPAYSKKFVVVGDGGCGKTCLLISYSQGYFPEKYVPTVFENYITQTLHRRSGKTVELALWDTAGQEEYDRLRPLSYPETDLLFVCFAIDCPASLENVMDKWYPEVLHFCPTTPIILVGLKSDLRNKRTCIELLKTQGLTPVTPEQGQAVAGRMNASYVECSSKEMRGVDSVFQLAVDTVVSLEEQNWDTRLPSSSGKPGGKPIGGKKIKKRSCKIL

SEQ ID NO: 570 - DNA, 573 bp, Drosophila melanogaster
  CDS (1)..(573)
atgacggcgaacataacgaagagtccgcgcccgctgaaaataaccatcgtgggcgatggcatggtgggcaaaacctgcatgctgataacctacacacggaacgagttccccgaggagtacatacccacagtgttcgacaatcacgcctgcaacatagccgtagatgatcgggactacaatctgaccctctgggacactgccggccaggaggattacgaaaggctgcgccccctgagctatcccagtaccaactgcttcctgttgtgctattcgatcagcagtaggacctcattcgaaaacgtgaaaagcaagtggtggccggagatccgtcacttctccgcccacgttcccgtggttctcgtgggcaccaaactggacttgcgcattcccaactcggagaagttcgtgaccacacaggagggaaaaaagatgcgcaaagagatacacgcattcaacttggtcgagtgctccgccaagaagaagcagaacctgcagcaggtcttcgaggaggcggttagagccgtggagaggaaaccaaagacgacgtccaagcaatcgtgcaaaatactgtga

SEQ ID NO: 571 - protein, 190 aa, Drosophila melanogaster
MTANITKSPRPLKITIVGDGMVGKTCMLITYTRNEFPEEYIPTVFDNHACNIAVDDRDYNLTLWDTAGQEDYERLRPLSYPSTNCFLLCYSISSRTSFENVKSKWWPEIRHFSAHVPVVLVGTKLDLRIPNSEKFVTTQEGKKMRKEIHAFNLVECSAKKKQNLQQVFEEAVRAVERKPKTTSKQSCKIL

SEQ ID NO: 572 - DNA, 579 bp, Aplysia californica
  CDS (1)..(579)
atggcagcgatacgaaagaagcttgttatagtcggagatggtgcgtgtggtaaaacatgtctacttattgtcttcagcaaagaccagttccctgaagtttacgtgccaacagtttttgaaaattatgtagcagacattgaagttgatggcaaacaggttgagctagctctgtgggacacagcgggacaagaggactatgacagactgaggccgctgtcttaccctgacacagatgtcatcctcatgtgtttctctatagacagtccagacagtctggagaacataccggagaagtggacgcctgaggttcgtcacttttgtccaaatgttcctataatacttgtgggtaacaaaaaggatcttcgcaacgatgaaagtaccaaacgtgagctcatgaaaatgaaacaggaaccagtgagaccagaggatgggcgcgccatggctgagaaaatcaacgcctactcttatcttgagtgctctgctaaaaccaaggagggcgtgagggatgtgtttgagacagctaccagagctgcgctgcaagtgaaaaagaagaagaagggtggatgtgttgtattgtga

SEQ ID NO: 573 - protein, 192 aa, Aplysia californica
MAAIRKKLVIVGDGACGKTCLLIVFSKDQFPEVYVPTVFENYVADIEVDGKQVELALWDTAGQEDYDRLRPLSYPDTDVILMCFSIDSPDSLENIPEKWTPEVRHFCPNVPIILVGNKKDLRNDESTKRELMKMKQEPVRPEDGRAMAEKINAYSYLECSAKTKEGVRDVFETATRAALQVKKKKKGGCVVL

SEQ ID NO: 574 - DNA, 645 bp, Oryza sativa
  CDS (1)..(645)
atgagctcggcggcggcggcgacgaggttcatcaagtgcgtcaccgtgggggacggcgcggtggggaagacgtgcatgctcatctgctacacctgcaacaagttccccaccgattacatccccaccgtgttcgacaacttcagcgccaatgtctccgtggacgggagcgtcgtcaacctcggcctctgggacactgcaggtcaggaggattacagcaggttgaggcctctgagctacaggggagccgatgtgttcatcctgtccttctccctgataagcagggcgagctatgagaatgttcagaagaagtggatgccagagcttcgccggtttgcgcctggtgttcctgtagttcttgttggaaccaagttggatctccgtgaagatagggcctatcttgctgatcatccagcttcttccataataacaacggagcagggagaagaactgaggaagctaataggagcggtcgcctacatcgaatgcagctccaagacacagagaaacattaaagctgttttcgacactgccatcaaagtggtgcttcaacctccaagacataaggatgtaaccagaaagaaactccaatcaagctccaatcggccagtaaggcggtacttttgcggaagcgcttgtttcgcgtag

SEQ ID NO: 575 - protein, 214 aa, Oryza sativa
MSSAAAATRFIKCVTVGDGAVGKTCMLICYTCNKFPTDYIPTVFDNFSANVSVDGSVVNLGLWDTAGQEDYSRLRPLSYRGADVFILSFSLISRASYENVQKKWMPELRRFAPGVPVVLVGTKLDLREDRAYLADHPASSIITTEQGEELRKLIGAVAYIECSSKTQRNIKAVFDTAIKVVLQPPRHKDVTRKKLQSSSNRPVRRYFCGSACFA

SEQ ID NO: 576 - DNA, 594 bp, Oryza sativa
  CDS (1)..(594)
atgagcgcgtccaggttcataaagtgcgtcaccgtcggggacggcgccgtcggcaagacctgcatgctcatctcctacacctccaacaccttccccactgattatgttccgacggtgtttgacaacttcagtgccaacgtcgtggttgatggtaacaccgtcaacctcgggctatgggacactgcaggtcaggaggattacaacagactgagaccactgagttatcgtggagctgatgttttccttctggccttctcgctaatcagcaaggccagctatgagaatgtttcaaagaagtggatacctgagctgaagcattatgcacctggtgtgcctatcatccttgtgggaacaaagcttgatcttcgagatgacaagcagttttttgtggaccatcctggtgctgttcctatcaccactgctcagggagaggaactaagaaagcaaataggcgccccatactacatcgaatgcagctcaaagacccaactaaacgtcaagggcgttttcgatgcggcaataaaggtggtgctgcagccacccaaggcgaagaagaagaaaaaggcgcaaaggggggcgtgctccattttgtga

SEQ ID NO: 577 - protein, 197 aa, Oryza sativa
MSASRFIKCVTVGDGAVGKTCMLISYTSNTFPTDYVPTVFDNFSANVVVDGNTVNLGLWDTAGQEDYNRLRPLSYRGADVFLLAFSLISKASYENVSKKWIPELKHYAPGVPIILVGTKLDLRDDKQFFVDHPGAVPITTAQGEELRKQIGAPYYIECSSKTQLNVKGVFDAAIKVVLQPPKAKKKKKAQRGACSIL

SEQ ID NO: 578 - DNA, 594 bp, Oryza sativa
  CDS (1)..(594)
atgagcacggcgaggttcatcaagtgcgtcaccgtcggcgacggcgccgtcggcaagacatgcatgctcatctcctacaccagcaacactttccccacggattatgtgccgacggttttcgacaacttcagcgccaacgtggtcgtcgacggcaacacggtgaaccttgggctctgggatactgctggacaagaggattacaataggctgaggcctctcagctacagaggagctgatgtctttttactagcattttccctcatcagcaaagcgagctatgagaatattcacaagaagtggataccagagctgaggcattatgctcctaatgtgccaatcgtattagttggaaccaagcttgacttgcgtgaggacaagcagttcttcctggaccaccctggtctagcacctatttccactgcacagggggaggagctgaagaggatgataggtgctgcggcgtacatcgaatgcagctccaagacgcagcagaatgtgaaatcagtattcgactcggcgatcaaagttgtactttgcccgccaaagccgaagaagaagaacaccaggaagcagaggagttgctggatcctatga

SEQ ID NO: 579 - protein, 197 aa, Oryza sativa
MSTARFIKCVTVGDGAVGKTCMLISYTSNTFPTDYVPTVFDNFSANVVVDGNTVNLGLWDTAGQEDYNRLRPLSYRGADVFLLAFSLISKASYENIHKKWIPELRHYAPNVPIVLVGTKLDLREDKQFFLDHPGLAPISTAQGEELKRMIGAAAYIECSSKTQQNVKSVFDSAIKVVLCPPKPKKKNTRKQRSCWIL

SEQ ID NO: 580 - DNA, 645 bp, Oryza sativa
  CDS (1)..(645)
atggcgtccagcgcctcccggttcatcaagtgcgtcacggtgggcgacggcgccgtgggcaagacctgcatgctcatctgctacaccagcaacaagttccccactgactacataccaacggtgttcgacaatttcagcgcaaacgttgttgtggacagcaccacggtgaatctgggcctctgggatactgctgggcaagaggattacaaccggctcaggcctctgagctatcgtggtgctgatgttttcgtgcttgccttctctcttgtgagccgagctagctatgaaaatattatgaagaagtggataccggagctacagcattatgcacccggcgtgcccattgtgttggttggcacaaaattggatctccgtgaagacaagcactacttgttggaccatcctggcatgatacctgttaccacagcacagggtgaagaacttcgaaaacaaataggtgctgcttattacattgagtgcagctcaaagacacaacagaatgtcaaaggtgtgtttgatgctgctatcaaggtagtaatccagcctccaactaagcagagggaaaagaagaaaaagaaatcacgacaaggatgctctatgatgaacatgttccgtggaaggaaaatgtcatgcttcaaatcctga

SEQ ID NO: 581 - protein, 214 aa, Oryza sativa
MASSASRFIKCVTVGDGAVGKTCMLICYTSNKFPTDYIPTVFDNFSANVVVDSTTVNLGLWDTAGQEDYNRLRPLSYRGADVFVLAFSLVSRASYENIMKKWIPELQHYAPGVPIVLVGTKLDLREDKHYLLDHPGMIPVTTAQGEELRKQIGAAYYIECSSKTQQNVKGVFDAAIKVVIQPPTKQREKKKKKSRQGCSMMNMFRGRKMSCFKS

SEQ ID NO: 582 - DNA, 594 bp, Oryza sativa
  CDS (1)..(594)
atgagcgcgtctcggttcatcaagtgcgtcaccgtgggggacggcgccgtgggcaagacctgcatgctcatctcctacacctccaacaccttccccacggactatgttccaactgtttttgataacttcagtgcaaatgttgtggtcgatgggagcactgtgaacttggggttgtgggatacagcaggacaagaggactacaataggctacgcccgttgagctatcgtggcgctgatgttttcctgctggccttttctctgatcagcaaagcaagctatgagaatgtttctaaaaagtggatacctgaattaaggcattatgctcctggtgtgccaataattctcgttggaacaaagcttgatctgcgggatgataagcaatttttcgtagatcaccctggtgctgtacctatttccactgctcagggcgaagagctgaggaaactcattggtgcagcggcatacattgaatgcagttcaaaaacacagcaaaacatcaaggcagttttcgatgctgcgattaaggtggttctccagcctccaaagcaaaagaagaagaagaaaaaggcgcagaaaggatgtgccatcttgtaa

SEQ ID NO: 583 - protein, 197 aa, Oryza sativa
MSASRFIKCVTVGDGAVGKTCMLISYTSNTFPTDYVPTVFDNFSANVVVDGSTVNLGLWDTAGQEDYNRLRPLSYRGADVFLLAFSLISKASYENVSKKWIPELRHYAPGVPIILVGTKLDLRDDKQFFVDHPGAVPISTAQGEELRKLIGAAAYIECSSKTQQNIKAVFDAAIKVVLQPPKQKKKKKKAQKGCAIL

SEQ ID NO: 584 - DNA, 588 bp, Oryza sativa
  CDS (1)..(588)
atgagcgcgtctcggttcatcaagtgcgtcaccgtgggggacggcgccgtgggcaagacctgcatgctcatctcctacacctccaacaccttccccacggactatgttccaactgtttttgataacttcagtgcaaatgttgtggtcgatgggagcactgtgaacttggggttgtgggatacagcagaggactacaataggctacgcccgttgagctatcgtggcgctgatgttttcctgctggccttttctctgatcagcaaagcaagctatgagaatgtttctaaaaagtggatacctgaattaaggcattatgctcctggtgtgccaataattctcgttggaacaaagcttgatctgcgggatgataagcaatttttcgtagatcaccctggtgctgtacctatttccactgctcagggcgaagagctgaggaaactcattggtgcagcggcatacattgaatgcagttcaaaaacacagcaaaacatcaaggcagttttcgatgctgcgattaaggtggttctccagcctccaaagcaaaagaagaagaagaaaaaggcgcagaaaggatgtgccatcttgtaa

SEQ ID NO: 585 - protein, 195 aa, Oryza sativa
MSASRFIKCVTVGDGAVGKTCMLISYTSNTFPTDYVPTVFDNFSANVVVDGSTVNLGLWDTAEDYNRLRPLSYRGADVFLLAFSLISKASYENVSKKWIPELRHYAPGVPIILVGTKLDLRDDKQFFVDHPGAVPISTAQGEELRKLIGAAAYIECSSKTQQNIKAVFDAAIKVVLQPPKQKKKKKKAQKGCAIL

SEQ ID NO: 586 - DNA, 645 bp, Oryza sativa
  CDS (1)..(645)
atgagcggcgccaccaagttcatcaagtgcgtcaccgtcggcgacggcgccgtcggcaagacctgcatgctcatctgctacaccagcaacaagttccccaccgattacatccccaccgtgttcgacaacttcagtgctaatgtttcagtggatgggaacatcgtcaacttgggattatgggacactgctggacaagaggattacagcaggctgaggccactgagctacaggggagcggatatatttgtgctggcattctcactgatcagcagagcaagctatgagaatgttctcaagaagtggatgccggagcttcgccggttcgcaccgaatgttccaattgttcttgttgggaccaagttagatctacgtgaccacagatcttaccttgcggaccatcctgctgcttccgcaattacgactgcacagggtgaagaacttagaaagcagataggcgccgcggcttacatcgaatgcagttcgaaaacacaacagaacatcaaggccgtgtttgatactgccatcaaggtggtccttcagcctcctcggagaaggggggagacgacgatggcaaggaagaagacaaggcgaagcaccggctgctcgttaaagaacttgatgtgtggcagtgcatgtgttgtttag

SEQ ID NO: 587 - protein, 214 aa, Oryza sativa
MSGATKFIKCVTVGDGAVGKTCMLICYTSNKFPTDYIPTVFDNFSANVSVDGNIVNLGLWDTAGQEDYSRLRPLSYRGADIFVLAFSLISRASYENVLKKWMPELRRFAPNVPIVLVGTKLDLRDHRSYLADHPAASAITTAQGEELRKQIGAAAYIECSSKTQQNIKAVFDTAIKVVLQPPRRRGETTMARKKTRRSTGCSLKNLMCGSACVV

SEQ ID NO: 588 - DNA, 648 bp, Oryza sativa
  CDS (1)..(648)
atggcgtccagcgcgtcgcggttcatcaagtgcgtcacggtcggggacggcgccgtcggcaagacctgcatgctcatctgctacaccagcaacaagttccccactgattacgtacccactgtttttgacaatttcagtgcaaacgtggtggtcgacggcaccacggtgaatttgggtctctgggatactgcagggcaggaagattacaacagattgaggccgctaagctaccgtggcgccgatgtctttgtgcttgccttctccctagtgagccgagctagctatgagaatgtcatgaagaagtggttaccagagcttcagcattatgcaccaggggtgccaattgtgttggttgggaccaaattggatcttcgtgaagataaacactacttacttgaccatcctagcttggtgcctgtgactacagcacagggagaggaactccgcaagcacattggcgcaacgtgttacatcgaatgcagctcaaagacacagcagaatgtaaaagctgtgtttgatgctgccatcaaggtagtaatcaagcctccaacaaagcagagggacaggaagaagaagaaaacacggcgcggatgttctttcttctgcaagggtgtcatgtccagaagaaggctagtatgcttcaagtga

SEQ ID NO: 589 - protein, 215 aa, Oryza sativa
MASSASRFIKCVTVGDGAVGKTCMLICYTSNKFPTDYVPTVFDNFSANVVVDGTTVNLGLWDTAGQEDYNRLRPLSYRGADVFVLAFSLVSRASYENVMKKWLPELQHYAPGVPIVLVGTKLDLREDKHYLLDHPSLVPVTTAQGEELRKHIGATCYIECSSKTQQNVKAVFDAAIKVVIKPPTKQRDRKKKKTRRGCSFFCKGVMSRRRLVCFK

SEQ ID NO: 590 - DNA, 639 bp, Zea mays
  CDS (1)..(639)
atgagcgtgaccaagttcatcaagtgcgtcacggtgggcgacggcgcggtgggcaagacctgcatgctcatctgctacaccagcaacaagttccccacggactacatccccacggtgttcgacaacttcagcgccaacgtctccgtggacggcagcatcgtcaacctgggcctctgggacaccgcggggcaagaggactacagcaggctgcggccgctgagctacaggggcgcggacgtgttcgtgctggccttctccctgatcagcagggcgagctacgagaacgttcttaagaagtgggtgccagagcttcgcagattcgcgcccaacgtcccggtcgttcttgttgggaccaagttagatctccgcgaccacagagcctacctcgccgaccatcctggagcttcagcagtcaccacggcgcagggtgaggaactgaggaagcagatcggcgctgcggcctacatcgagtgcagttccaaaacccagcagaacgtcaagtctgtcttcgatacggccatcaaagtggtccttcagcccccacggaggagggaggcagtgcctgccaggaagaagaacaggcgtggctccggatgctctataatgaaccttgtgtgtggcagcacatgtgctgcttag

SEQ ID NO: 591 - protein, 212 aa, Zea mays
MSVTKFIKCVTVGDGAVGKTCMLICYTSNKFPTDYIPTVFDNFSANVSVDGSIVNLGLWDTAGQEDYSRLRPLSYRGADVFVLAFSLISRASYENVLKKWVPELRRFAPNVPVVLVGTKLDLRDHRAYLADHPGASAVTTAQGEELRKQIGAAAYIECSSKTQQNVKSVFDTAIKVVLQPPRRREAVPARKKNRRGSGCSIMNLVCGSTCAA

SEQ ID NO: 592 - DNA, 630 bp, Brassica napus
  CDS (1)..(630)
atgagtgcttcaaagttcattaaatgtgtaactgtcggagacggagctgtcgggaagacatgtatgcttatctgttacactagcaacaagtttcccactgattatatacccactgtgttcgacaacttcagtgccaatgtctccgtggatggacaaatcgtgaatctggggctttgggacactgccggtcaagaagattacagtaggttgaggccattgagttacagaggagctgatatcttcgtcttagccttttctcttatcagcaaggctagttacgagaatgtacttaagaagtggatgcctgaacttcgtcggtttgcgcctaatgttcccattgtccttgttggtacaaagctagatctccgtgatgacaagggatacctcgcggatcacaccaatgtcattacctctgctcagggagaggaattgaggaagcaaatcggtgcagctgcttacatcgagtgcagttccaagactcaacagaatgtgaaaggagtgtttgacacagctatcaaagtggttctccagccaccacggaggaaagaggtcactgggaataagaagaaacacagaagatcaggctgctcctttgcgagcattgtctgcggaggctgcgccacagcttag

SEQ ID NO: 593 - protein, 209 aa, Brassica napus
MSASKFIKCVTVGDGAVGKTCMLICYTSNKFPTDYIPTVFDNFSANVSVDGQIVNLGLWDTAGQEDYSRLRPLSYRGADIFVLAFSLISKASYENVLKKWMPELRRFAPNVPIVLVGTKLDLRDDKGYLADHTNVITSAQGEELRKQIGAAAYIECSSKTQQNVKGVFDTAIKVVLQPPRRKEVTGNKKKHRRSGCSFASIVCGGCATA

SEQ ID NO: 594 - DNA, 606 bp, Brassica napus
  CDS (1)..(606)
atgagcacagcgagattcatcaagtgtgtgacggtcggagatggagctgtggggaagacttgtatgctgatttcatataccagcaatacttttcctacggattacgttccgacagtttttgacaatttcagtgcgaatgtggtggtcgatggaagtactgtcaacctcggcctgtgggatactgctgggcaggaagattataacaggcttcggcctttgagttacagaggagcagatgtgtttttattggcattttccctaattagcaaggccagttacgagaacatttacaaaaagtggcttccggagctgaaacattatgcgcctagcatccccattgtactcgtcggaaccaagttagatttgagggatgacaaacagttcttgaaagatcatccaggagcagcttcaataacaactgcccagggagaggaattaagaaagatgattggagccatcaagtacttagaatgcagctccaaaacccagcagaatgtgaaggcagtgtttgatacagcgatccgggtagcgttgaggcctccaaaggcaaagaagaagataaagccattgaggaccaaaagatcaagaacatgctttttcttctaa

SEQ ID NO: 595 - protein, 201 aa, Brassica napus
MSTARFIKCVTVGDGAVGKTCMLISYTSNTFPTDYVPTVFDNFSANVVVDGSTVNLGLWDTAGQEDYNRLRPLSYRGADVFLLAFSLISKASYENIYKKWLPELKHYAPSIPIVLVGTKLDLRDDKQFLKDHPGAASITTAQGEELRKMIGAIKYLECSSKTQQNVKAVFDTAIRVALRPPKAKKKIKPLRTKRSRTCFFF

SEQ ID NO: 596 - DNA, 651 bp, Brassica napus
  CDS (1)..(651)
atggcttcaagtgcttcaaagttcatcaaatgtgtaactgttggtgatggtgccgttggtaaaacctgtatgctcatctgctataccagcaacaagttccctactgactatgtaccaacggtttttgacaactttagtgcaaacgttgtagttgaaggaactactgtgaacttagggctatgggatactgctggacaagaagactataacagattaaggcctttaagctacagaggagcagatgtcttcgtcttgtctttctcattggttagccgagctagctacgagaatgtttttaaaaagtggatccctgaactccaacactttgctccaggagttccattagttcttgtcggtaccaaattagatctccgtgaggataagcattatctggctgaccatcctggactatcccctgtaactactgcacagggagaggagttgcgtaagctcattggtgcaacatattacattgaatgtagctcaaaaactcaacagaatgtcaaagcagtttttgattcggcaatcaaggaagtgatcaaaccggtgcttaaacagaagggcaagaccaagaaaaagaagaagcaacagtcgaatcaccacgggtgtttatcaaacgttttgtgtgggaggatagtgacccggcattga

SEQ ID NO: 597 - protein, 216 aa, Brassica napus
MASSASKFIKCVTVGDGAVGKTCMLICYTSNKFPTDYVPTVFDNFSANVVVEGTTVNLGLWDTAGQEDYNRLRPLSYRGADVFVLSFSLVSRASYENVFKKWIPELQHFAPGVPLVLVGTKLDLREDKHYLADHPGLSPVTTAQGEELRKLIGATYYIECSSKTQQNVKAVFDSAIKEVIKPVLKQKGKTKKKKKQQSNHHGCLSNVLCGRIVTRH

SEQ ID NO: 598 - DNA, 588 bp, Brassica napus
  CDS (1)..(588)
atgagcgcttcgaggttcataaagtgtgtcaccgtcggcgatggtgccgtcggaaaaacctgtatgctgatctcttacacgagcaacaccttccctacggactatgtaccaactgttttcgataacttcagtgctaatgtggttgttgatgggaacactgtgaatcttggcttgtgggatacagctggtcaagaagactataacaggttaagaccattgagttaccgtggtgcggatgtcttcattcttgctttctctcttatcagcaaagctagctacgagaatatagctaagaagtggattcctgagctcaggcactatgcccctggtgttcctattatcctcgttggaacaaaactcgatcttcgagatgacaagcagttcttcatagaccaccctggtgcagtgccgattagtactaaccagggagaggaactaaagaaactgatagggtctccggcttacattgaatgcagttcaaagacgcagcagaacgtgaaggcagtctttgacgcagccataaaagtagtgcttcagccaccaaagcaaaagaagaagaaaaagaagaatggttgtgttttcttgtga

SEQ ID NO: 599 - protein, 195 aa, Brassica napus
MSASRFIKCVTVGDGAVGKTCMLISYTSNTFPTDYVPTVFDNFSANVVVDGNTVNLGLWDTAGQEDYNRLRPLSYRGADVFILAFSLISKASYENIAKKWIPELRHYAPGVPIILVGTKLDLRDDKQFFIDHPGAVPISTNQGEELKKLIGSPAYIECSSKTQQNVKAVFDAAIKVVLQPPKQKKKKKKNGCVFL

SEQ ID NO: 600 - DNA, 681 bp, Glycine max
  CDS (1)..(681)
atggctgcaacagcttcaaggttcatcaagtgtgtgacagtcggggatggagctgtaggcaaaacttgcatgctcatttgctatacaagcaacaaattccccacggactatattccaacggtgtttgataatttcagtgcaaatgtggttgttgaaaacacaactgtcaatttaggcctctgggacactgctgggcaagaggattacaacaggctgaggccattgagctacaggggggcagatgtctttgtcttggctttctctttagttagccatgcaagctacgaaaatgtgttgaagaagtgggttcctgaactgcagcattttgctcctggtgtcccagtggtgctagttggcaccaaattggatcttcgagaagacaagcactatttggctgatcatcctggtctggcgcctgtgacttctgagcaaggtgaggaattgcgtaaactggtcggagctacgtattatatagagtgcagctcaaagactcagcagaatgtgaagtcagtttttgatgctgctatcaaggtggtcatcgagcctccacaaaaacatgagaagaagaaaaaaccacgtcgagggtgtctactgtcagtacacttttttcatatcataacaactcctgcacgtgaaactttcttacttgtgaaaagggatagatcattaagtgttcattga

SEQ ID NO: 601 - protein, 226 aa, Glycine max
MAATASRFIKCVTVGDGAVGKTCMLICYTSNKFPTDYIPTVFDNFSANVVVENTTVNLGLWDTAGQEDYNRLRPLSYRGADVFVLAFSLVSHASYENVLKKWVPELQHFAPGVPVVLVGTKLDLREDKHYLADHPGLAPVTSEQGEELRKLVGATYYIECSSKTQQNVKSVFDAAIKVVIEPPQKHEKKKKPRRGCLLSVHFFHIITTPARETFLLVKRDRSLSVH

SEQ ID NO: 602 - DNA, 588 bp, Brassica napus
  CDS (1)..(588)
atgagtgcttcaaggttaaagtgtgtcatcgtcggtgacggcgccgtcggcaagacttgtctactcatttcctacactagaaacactttccccaccggtgatgtgtcaaatgtttttgataatgtctgcgcccatgtgattgtcgatgggagcaccatcaacttggaattgtttgacactgcaggacaagatgactacaacagactaagaccattaagctatccatgtactgatgtcttcttgctcgcattctctcttgttaacaaagcgagctatgaaaatgttgctaaaaagtgggttcctgaactcagacatcatgctcctgatgttcccatcgtacttgttggaacaaagctcgatgctcgagatgataagcagtactttcttgagcaccctgaagctgttcctatatctactgctcagggtgaagaactaaagaggcttgttggagcttctgcttatatagaatgcagttcaaagacacaactgaatgttaaagctgtctttgacgaggccatcaaagtagttctcgagccacccaataacaacaacattagtacatctcagaaaggctgttccatattgtga

SEQ ID NO: 603 - protein, 195 aa, Brassica napus
MSASRLKCVIVGDGAVGKTCLLISYTRNTFPTGDVSNVFDNVCAHVIVDGSTINLELFDTAGQDDYNRLRPLSYPCTDVFLLAFSLVNKASYENVAKKWVPELRHHAPDVPIVLVGTKLDARDDKQYFLEHPEAVPISTAQGEELKRLVGASAYIECSSKTQLNVKAVFDEAIKVVLEPPNNNNISTSQKGCSIL

SEQ ID NO: 604 - DNA, 624 bp, Triticum aestivum
  CDS (1)..(624)
atggcgtcgcgccggcgaatgctcctcaaggtcatcatcctcggcgacagcggggtcgggaagacgtcgctgatgaaccagtacgtcaacaacaagttcagcaaccagtacaaggccaccatcggcgccgatttcctcaccaaggaggtcaagatcgacgaccgcctcttcactctacagatatgggacacggcaggacaggaacgttttcagagtcttggtgtggcgttttatcggggagctgactgttgtgttcttgtatatgatgtcaatgttaccaagtcatttgaaaaactcaacaactggcgtgaggaatttctaattcaagctagcccgtcagatccagagaattttccttttgttttacttggaaacaagattgatgttgatggtggtaacagcaggactgtttctgagaaaaaagctaaagcctggtgtgcttccaagggaaacatcccttattttgagacgtctgctaaagaaggcttcaatgtggaagcagctttcgagtgtatagcaaggaatgccatcaagaatgaacctgaagaagatatatatctccctgatacaatcgacatgggcggtgctggaaggcaacaacgctcgtcaggttgtgaatgctag

SEQ ID NO: 605 - protein, 207 aa, Triticum aestivum
MASRRRMLLKVIILGDSGVGKTSLMNQYVNNKFSNQYKATIGADFLTKEVKIDDRLFTLQIWDTAGQERFQSLGVAFYRGADCCVLVYDVNVTKSFEKLNNWREEFLIQASPSDPENFPFVLLGNKIDVDGGNSRTVSEKKAKAWCASKGNIPYFETSAKEGFNVEAAFECIARNAIKNEPEEDIYLPDTIDMGGAGRQQRSSGCEC

SEQ ID NO: 606 - DNA, 612 bp, Zea mays
  CDS (1)..(612)
atggcggccaacgccgggaataagatccgcaacgccaagctggttcttcttggagatgtgggcgctggcaaatctagcttggttcttcggtttgttaagggacagtttgttgaattccaggaatcaacaattggagcagccttcttttcccagaccttagcggtcaatgatgagactgttaagttcgaaatctgggatactgccgggcaggagaggtatcatagcttggctcccatgtactataggggtgcagctgctgccattgttgtctatgacatcacaaatccggcctccttcacccgtgccaagaaatgggttcaagaacttcaagctcaaggaaatcagaataccatagtggctcttgctggaaacaaggctgatatgctagatgcgaggcaggtgccagcagaggaagcaaaggcgtatgctcaggagaatgggctcttcttcatggagacatctgctaaaactgcaatcaatgtgaatgacatattttatgagattgcaaagaaattgcttcaagggcaacaagctccaagcccacaggctggaatggttctgaatcagagaccaaatgagaggacggtcagcagttcttcatgctgctcttga

SEQ ID NO: 607 - protein, 203 aa, Zea mays
MAANAGNKIRNAKLVLLGDVGAGKSSLVLRFVKGQFVEFQESTIGAAFFSQTLAVNDETVKFEIWDTAGQERYHSLAPMYYRGAAAAIVVYDITNPASFTRAKKWVQELQAQGNQNTIVALAGNKADMLDARQVPAEEAKAYAQENGLFFMETSAKTAINVNDIFYEIAKKLLQGQQAPSPQAGMVLNQRPNERTVSSSSCCS

SEQ ID NO: 608 - DNA, 648 bp, Zea mays
  CDS (1)..(648)
atggattcctcctcgtccagcctcagccagcagcccgagttcgactacctcttcaagctactccttatcggcgactccggcgtcggcaagagcagcctcctcctccgcttcaccgccgactccttcgatgacctctcccctaccataggtgttgacttcaaggtgaagatggttagcattggtggcaaaaaactcaagcttgccatctgggacacagctggacaagagaggtttaggaccttgaccagctcttactacagaggggcacaggggatcattatggtgtatgatgtcagtcgacgagagacgttcaccaatctttctgatatatgggccaaggaaattgacctgtattcaaccaaccaggactgtgtaaagatgcttgttggaaataaagtagacaaggaaagtgagagggctgtcacgaaaaaggagggaattgaatttgccagggaatacggttgtttgtttctagaatgcagtgcgaaaacaaaagtaaacgtagaacagtgttttgaggaactggttctaaagatcttagacacgccaagcctcctggcggatgcttcctcagcaggggtcagcaagaagaacatcttcaagcagaaggctccagaagctgacgccgccacaggcagctgctgttaa

SEQ ID NO: 609 - protein, 215 aa, Zea mays
MDSSSSSLSQQPEFDYLFKLLLIGDSGVGKSSLLLRFTADSFDDLSPTIGVDFKVKMVSIGGKKLKLAIWDTAGQERFRTLTSSYYRGAQGIIMVYDVSRRETFTNLSDIWAKEIDLYSTNQDCVKMLVGNKVDKESERAVTKKEGIEFAREYGCLFLECSAKTKVNVEQCFEELVLKILDTPSLLADASSAGVSKKNIFKQKAPEADAATGSCC

SEQ ID NO: 610 - DNA, 603 bp, Glycine max
  CDS (1)..(603)
atggctacgatcggacacaacaatctcaatgccaaattggttcttctcggggacatgggtgctgggaaatccagcctcgttttgcgctttgtcaagggtcaatttctcgaatttcaggaatcaacaataggggcagcgttcttttcacagacgctggcagtaaatgacgcgacggtaaagtttgagatatgggacacagcaggacaagagaggtaccatagcttggctcccatgtattacagaggtgctgctgctgctatcattgtctatgacatcactagctcggactcctttacccgaactaagaagtgggtccaagagcttcaaaagcaagggaatcctaatatggtcatggctcttgctggtaacaaagctgatttggaagataagaggaaagtgacagctgaagaagcacgtgtatatgctgaagaaaatggtttgtttttcatggagacctctgccaaaactgcatccaacgttaatgatatattctatgaaatagccaagaggttaccaagggctcagccagctcagaacccagctgggatggtacttgttgatagacccgccgaaggaactagggctgcatcatgttgttcataa

SEQ ID NO: 611 - protein, 200 aa, Glycine max
MATIGHNNLNAKLVLLGDMGAGKSSLVLRFVKGQFLEFQESTIGAAFFSQTLAVNDATVKFEIWDTAGQERYHSLAPMYYRGAAAAIIVYDITSSDSFTRTKKWVQELQKQGNPNMVMALAGNKADLEDKRKVTAEEARVYAEENGLFFMETSAKTASNVNDIFYEIAKRLPRAQPAQNPAGMVLVDRPAEGTRAASCCS

SEQ ID NO: 612 - DNA, 618 bp, Triticum aestivum
  CDS (1)..(618)
atggcggccagcgccggcagcaagatccgcaacgccaaactggttcttcttggcgatgtgggtgctgggaaatccagcctggtgcttcggtttgtaaaaggacaatttgttgaattccaggaatcgacaattggagcggctttcttctctcaaacattggctgttaatgacgagactgtgaagtttgaaatttgggatactgctgggcaggagaggtatcacagcttggcccccatgtactacaggggtgctgccgcagccatagttgtctatgacatctcgaaccaggcatccttcacccgagcaaagaaatgggttcaagaacttcaagctcaaggaaaccagaatacagtagtggctcttgctggcaacaaagctgatttgcttgaggcgagggaggttcaaatagaggaagccaagacgtatgcgcaggagaatggcctcttcttcatggaaacatctgctaaaactgcaaccaatgtgaatgacatattttatgagattgcgaagagattgctgcaagggcaggcagcgcagaacccacaggcggcggggatggttctctcccagagacccaatgagagagtggtcagcgcggcttcgtgctgctcctcctga

SEQ ID NO: 613 - protein, 205 aa, Triticum aestivum
MAASAGSKIRNAKLVLLGDVGAGKSSLVLRFVKGQFVEFQESTIGAAFFSQTLAVNDETVKFEIWDTAGQERYHSLAPMYYRGAAAAIVVYDISNQASFTRAKKWVQELQAQGNQNTVVALAGNKADLLEAREVQIEEAKTYAQENGLFFMETSAKTATNVNDIFYEIAKRLLQGQAAQNPQAAGMVLSQRPNERVVSAASCCSS

SEQ ID NO: 614 - DNA, 612 bp, Zea mays
  CDS (1)..(612)
atgaatcccgagtacgactaccttttcaaacttctgcttattggtgattctggtgttgggaaatcatgcttgcttctcagatttgcagacgattcttatttggacagctatatcagcacaattggggttgatttcaaaattcgcacagtggagcaagatgggaagaccataaaacttcaaatttgggatactgctgggcaagagcgcttcaggacaatcactagcagctactaccgcggagctcatggaatcattattgtatatgacgtgacagaccaagaaagcttcaataatgtgaagcaatggttgaacgagatagaccgttatgcaagtgataatgttaacaagctccttgttgggaacaagagtgaccttactgccaacaaagttgtggcaactgagacagcaaaggcgtttgctgatgagatgggcatcccattcatggagacgagtgccaaaaacgccatcaacgtggagcaggccttcatggctatggctgcatccatcaaggataggatggccagccaaccagccgcggccaacgcaaggccagcgaccgtgcagatccgcgggcaacccgtcaaccagaagacgtcttgctgctcgtcctaa

SEQ ID NO: 615 - protein, 203 aa, Zea mays
MNPEYDYLFKLLLIGDSGVGKSCLLLRFADDSYLDSYISTIGVDFKIRTVEQDGKTIKLQIWDTAGQERFRTITSSYYRGAHGIIIVYDVTDQESFNNVKQWLNEIDRYASDNVNKLLVGNKSDLTANKVVATETAKAFADEMGIPFMETSAKNAINVEQAFMAMAASIKDRMASQPAAANARPATVQIRGQPVNQKTSCCSS

SEQ ID NO: 616 - DNA, 594 bp, Brassica napus
  CDS (1)..(594)
atgagcgcttcgaggttcataaagtgtgtcacagtcggcgatggtgccgtcggaaaaacatgtatgctgatctcttacaccagcaacactttccctacggactatgtaccaactgttttcgacaacttcagtgctaatgttgttgtagatgggaacacagttaatcttggcttgtgggatacagccggtcaagaagactataacaggttaagaccattgagttaccgtggtgcagatgtcttcattcttgctttctcgcttattagcaaagctagctacgagaacatagccaaaaagtggattcctgagctcaggcattatgcacctggtgtccccattatcctcgttggatcaaagcttgatcttcgagatgataagcagttcttcatcgaccatcctggtgctgtcccaatcactactgctcagggagaggagctgaagaagctaatagaagcacctttttacatcgaatgcagttccaaatctcaagagaatgtgaaagcagtgtttgacgcagccatacgagtggtcttgcaacctccgaagcagaagaagaaaaagagcaaagcgcagaaggcatgctccatcctatga

SEQ ID NO: 617 - protein, 197 aa, Brassica napus
MSASRFIKCVTVGDGAVGKTCMLISYTSNTFPTDYVPTVFDNFSANVVVDGNTVNLGLWDTAGQEDYNRLRPLSYRGADVFILAFSLISKASYENIAKKWIPELRHYAPGVPIILVGSKLDLRDDKQFFIDHPGAVPITTAQGEELKKLIEAPFYIECSSKSQENVKAVFDAAIRVVLQPPKQKKKKSKAQKACSIL

SEQ ID NO: 618 - DNA, 636 bp, Brassica napus
  CDS (1)..(636)
atgagtgcttcaaagttcattaaatgtgtaactgtcggagacggagctgtcgggaagacatgtatgcttatctgttacactagcaacaagtttcccactgattatataccgactgtgttcgacaacttcagtgccaatgtctccgtggatggacagatcgtgaatctagggctatgggacactgctggtcaagaagattacagtaggttgaggccattgagttacagaggagctgatatcttcgtcttagccttttctcttatcagcaaggctagttacgagaatgtacttaagaagtggatgcctgaacttcgtcggtttgcgcctaatgttcccatagtccttgttggtacaaagctagatctccgtgatgacaagggatacctcgcggatcacaccaatgtcattacctctactcagggagaggaattgaggaagcaaatcggtgcagctgcttacatcgagtgcagttccaagactcaacagaatgtgaaagcagtgtttgacacagcgatcaaagtggttctccagccaccacggaggaaagaggtcactgggaataagaagaaacacagaagatccggctgctcctttgcgagcattgtctgcggaggctggccacagcgtaggacataa

SEQ ID NO: 619 - protein, 211 aa, Brassica napus
MSASKFIKCVTVGDGAVGKTCMLICYTSNKFPTDYIPTVFDNFSANVSVDGQIVNLGLWDTAGQEDYSRLRPLSYRGADIFVLAFSLISKASYENVLKKWMPELRRFAPNVPIVLVGTKLDLRDDKGYLADHTNVITSTQGEELRKQIGAAAYIECSSKTQQNVKAVFDTAIKVVLQPPRRKEVTGNKKKHRRSGCSFASIVCGGWPQRRT

SEQ ID NO: 620 - DNA, 597 bp, Brassica napus
  CDS (1)..(597)
atgagtgcttcgaggtttatcaagtgtgtcaccgtcggcgacggcgctgtcggaaagacttgtctgctcatctcctacactagcaacactttccccacggactatgtgccaactgtgtttgataatttcagcgcgaatgtgattgtggatgggaacactatcaacttgggattgtgggatactgcagggcaagaggactacaatagactaagaccattgagctatcgcggcgcagatgtcttcttactcgctttctcccttgtcagcaaagctagctatgaaaatgtttctaaaaagtgggtacctgaactgagacattatgctcctggtgttccaatcatcctcgtcggaaccaagcttgatcttcgagatgacaagcaattctttgttgagcaccctggtgctgttcctatctctactgctcagggtgaagaactgaagaaggtgattggggcacctgcttatattgaatgcagtgcaaaaacacaacagaatgtaaaagcggtgtttgatgcggctatcaaggtagttctccaaccacccaaaaacaagaagaggaagaagagaaagtctcagaaagcttgttctatattgtga

SEQ ID NO: 621 - protein, 198 aa, Brassica napus
MSASRFIKCVTVGDGAVGKTCLLISYTSNTFPTDYVPTVFDNFSANVIVDGNTINLGLWDTAGQEDYNRLRPLSYRGADVFLLAFSLVSKASYENVSKKWVPELRHYAPGVPIILVGTKLDLRDDKQFFVEHPGAVPISTAQGEELKKVIGAPAYIECSAKTQQNVKAVFDAAIKVVLQPPKNKKRKKRKSQKACSIL

SEQ ID NO: 622 - DNA, 597 bp, Brassica napus
  CDS (1)..(597)
atgagtgcttcaaggttcataaagtgcgtcaccgtcggtgacggcgccgtcggcaagacttgtctactcatctcctacacaagcaacactttccccactgattatgtgccaactgtctttgataatttcagtgctaatgtgattgttgatgggaacaccatcaacttgggattgtgggacactgcaggacaagaggactataatagactaagaccattgagctatcgtggtgctgatgtcttcttgctcgcattctctctagtcagcaaagctagctatgaaaatgttgctaaaaagtgggttcctgaactcagacattacgctcctggtgttccaatcatccttgttggaacaaagcttgatcttcgagatgataagcagtactttgttgagcaccctggagctgtgcctatatctactgctcagggtgaagaactgaagaagcttgttggaacttctgcttatatagaatccagtgcaaagacccaacagaatgtaaaagctgtctttgatgcggctattaaagtagttctccagccacctaaaaacaagaagaaaaagaagagaaagtctcagaaaggctgttctatattgtga

SEQ ID NO: 623 - protein, 198 aa, Brassica napus
MSASRFIKCVTVGDGAVGKTCLLISYTSNTFPTDYVPTVFDNFSANVIVDGNTINLGLWDTAGQEDYNRLRPLSYRGADVFLLAFSLVSKASYENVAKKWVPELRHYAPGVPIILVGTKLDLRDDKQYFVEHPGAVPISTAQGEELKKLVGTSAYIESSAKTQQNVKAVFDAAIKVVLQPPKNKKKKKRKSQKGCSIL

SEQ ID NO: 624 - DNA, 606 bp, Brassica napus
  CDS (1)..(606)
atgagcacagcgagattcatcaagtgtgtgacggtcggagatggagctgtggggaagacttgtatgctgatttcatataccagcaatacttttcctacggattacgttccgacagtttttgacaatttcagtgcgaatgtggtggtcgatggaagtactgtcaacctcggcctgtgggatactgctgggcaggaagattataacaggcttcggcctttgagttacagaggagcagatgtgtttttattggcattttccctaattagcaaggccagttacgagaacatttacaaaaagtggcttccggagctgaaacattatgcgcctagcatccccattgtactcgtcggaaccaagttagatttgagggatgacaagcagttcttgaaagatcatccaggagcagcttcaataacaactgcccagggagaggaattaagaaagatgattggagccatcaagtacttagaatgcagctccaaaacccagcagaatgtgaaggcagtgtttgatacagcgatccgggtagcgttgaggcctccaaaggcaaagaagaagataaagccattgaggaccaaaagatcaagaacatgctttttcctctaa

SEQ ID NO: 625 - protein, 201 aa, Brassica napus
MSTARFIKCVTVGDGAVGKTCMLISYTSNTFPTDYVPTVFDNFSANVVVDGSTVNLGLWDTAGQEDYNRLRPLSYRGADVFLLAFSLISKASYENIYKKWLPELKHYAPSIPIVLVGTKLDLRDDKQFLKDHPGAASITTAQGEELRKMIGAIKYLECSSKTQQNVKAVFDTAIRVALRPPKAKKKIKPLRTKRSRTCFFL

SEQ ID NO: 626 - DNA, 648 bp, Brassica napus
  CDS (1)..(648)
atggcttcaagtgcttcaaagttcataaaatgtgtgactgttggtgatggcgccgttggtaaaacctgtatgctcatctgctacaccagcaacaaattccctactgactacataccaacagtttttgacaactttagtgcaaacgttgtagttgaaggcaccactgtgaacctaggcctatgggacactgctggacaagaagactataacagattaaggcctttaagttacagaggagcagatgttttcgtcttgtctttctcattggtcagccgagctagctacgagaatgtttttaaaaagtggatccctgaactccaacactttgccccaggagttccattagtccttgttggtaccaaattagatctccgcgaagataagcactatttggctgaccatcctggactatcccctgtaaccactgcacagggagaggaactgcgtaagctaattggagcaacatattacattgaatgcagctcaaaaactcaacagaacgtgaaagcagtttttgattctgcaatcaaggaagtgatcaaaccggtggttaaacaaaaggagaagacgaagaaaaagaagaagcaaaagtcaaaacatgggtgtttatcaaacattctgtgtgggaggatagtgactcggcattga

SEQ ID NO: 627 - protein, 215 aa, Brassica napus
MASSASKFIKCVTVGDGAVGKTCMLICYTSNKFPTDYIPTVFDNFSANVVVEGTTVNLGLWDTAGQEDYNRLRPLSYRGADVFVLSFSLVSRASYENVFKKWIPELQHFAPGVPLVLVGTKLDLREDKHYLADHPGLSPVTTAQGEELRKLIGATYYIECSSKTQQNVKAVFDSAIKEVIKPVVKQKEKTKKKKKQKSKHGCLSNILCGRIVTRH

SEQ ID NO: 628 - DNA, 606 bp, Brassica napus
  CDS (1)..(606)
atgagcacagcgagattcatcaagtgtgtgacggtcggagatggagctgtggggaagacttgtatgctgatttcatataccagcaatacttttcctacggattacgttccgacagtttttgacaatttcagtgcgaatgtggtggtcgatggaagtactgtcaacctcggcctgtgggatactgctgggcaggaagattataacaggcttcggcctttgagttacagaggagcagatgtgtttttattggcattttccctaattagcaaggccagttacgagaacatttacaaaaagtggcttccggagctgaaacattatgcgcctagcatccccattgtactcgtcggaaccaagttagatttgagggatgacaaacagttcttgaaagatcatccaggagcagcttcaataacaactgcccagggagaggaattaagaaagatggttggagccatcaagtacttagaatgcagctccaaaacccagcagaatgtgaaggcagtgtttgatacagcgatccgggtagcgttgaggcctccaaaggcaaagaagaagataaagccattgaggaccaaaagatcaagaacatgctttttcttctaa

SEQ ID NO: 629 - protein, 201 aa, Brassica napus
MSTARFIKCVTVGDGAVGKTCMLISYTSNTFPTDYVPTVFDNFSANVVVDGSTVNLGLWDTAGQEDYNRLRPLSYRGADVFLLAFSLISKASYENIYKKWLPELKHYAPSIPIVLVGTKLDLRDDKQFLKDHPGAASITTAQGEELRKMVGAIKYLECSSKTQQNVKAVFDTAIRVALRPPKAKKKIKPLRTKRSRTCFFF

SEQ ID NO: 630 - DNA, 588 bp, Brassica napus
  CDS (1)..(588)
atgagcgcttcgaggttcataaagtgtgttacagtcggcgatggtgccgtcggaaaaacatgtatgctgatctcttacaccagcaacactttccctacggactatgttccaactgttttcgacaacttcagtgctaacgtggttgttgatgggaacactgtgaatcttggattgtgggatacagctggtcaagaagactataacaggttaagaccattgagttaccgtggtgcagatgtcttcattcttgctttctctcttattagcaaagctagctacgagaacatagccaaaaagtggattcctgagctcaggcattatgcacctggagttcctattatcctcgttggaacaaaactcgatcttcgagatgacaagcagttcttcatagaccatcctggcgcagtgccgattactacaaaccagggagaggaactaaagaaactgatagggtctccggcttacattgaatgcagttcaaagacgcagcagaacgtgaaggcagtctttgacgcagccataaaagtagtgcttcagccaccaaagcaaaagaagaagaaaaagaagaatggttgtgttttcttgtga

SEQ ID NO: 631 - protein, 195 aa, Brassica napus
MSASRFIKCVTVGDGAVGKTCMLISYTSNTFPTDYVPTVFDNFSANVVVDGNTVNLGLWDTAGQEDYNRLRPLSYRGADVFILAFSLISKASYENIAKKWIPELRHYAPGVPIILVGTKLDLRDDKQFFIDHPGAVPITTNQGEELKKLIGSPAYIECSSKTQQNVKAVFDAAIKVVLQPPKQKKKKKKNGCVFL

SEQ ID NO: 632 - DNA, 597 bp, Brassica napus
  CDS (1)..(597)
atgagtgcttcgaggtttatcaagtgtgtcaccgtcggcgacggcgctgtcggaaagacttgtctgctcatctcctacactagcaacactttccccacggactatgtgccaactgtgtttgataatttcagcgcgaatgtgattgtggatgggaacactatcaacttgggattgtgggatactgcagggcaagaggactacaatagactaagaccattgagctatcgcggcgcagatgtcttcttactcgctttctcccttgtcagcaaagctagctatgaaaatgtttctaaaaagtgggtacctgaactgagacattatgctcctggtgttcccatcatcctcgttggaaccaagcttgatcttcgagatgacaagcaattctttgttgagcaccctggtgctgttcctatctctactgctcagggtgaagaactgaagaagctgattggggctcctgcttatatcgaatgcagtgcaaaaacacaacagaatgtaaaagcggtgtttgatgcggctatcaaggtagttctccagccacccaaaaacaagaagaggaagaagaggaagtctcagaaaggttgctctatattgtga

SEQ ID NO: 633 - protein, 198 aa, Brassica napus
MSASRFIKCVTVGDGAVGKTCLLISYTSNTFPTDYVPTVFDNFSANVIVDGNTINLGLWDTAGQEDYNRLRPLSYRGADVFLLAFSLVSKASYENVSKKWVPELRHYAPGVPIILVGTKLDLRDDKQFFVEHPGAVPISTAQGEELKKLIGAPAYIECSAKTQQNVKAVFDAAIKVVLQPPKNKKRKKRKSQKGCSIL

SEQ ID NO: 634 - DNA, 603 bp, Brassica napus
  CDS (1)..(603)
atggccaccgctggaaacaagaacatcaacgccaaattggtattgcttggagatgttggggctggaaaatcaagtcttgtgcttcggtttgtcaaagatcagtttgttgagttccaggaatcaaccataggtgcagcttttttctctcaaacactggctgtgaatgacgcaactgtcaagtttgagatatgggatacagctggtcaggaacgttaccatagcttggctccaatgtactacaggggtgcagctgctgccattattgtctttgacattactaatcaagcgtcatttgagagagcgaagaaatgggttcaagaactgcaggcacaaggtaaccctaatatggtgatggctcttgctggaaacaaagctgatttattggatgcaaggaaagtgtctccagaggaggcagagacatatgcgcaagagaacagccttttcttcatggaaacctcagcgaagactgcaacaaatgtcaaagacatcttctacgaaatcgcaaaaaggctaccgcgcgtgcagccagcagaaaacccaacagggatggttctcccaaacgggccaggagctacggcagcaagcgcatcatgttgtgcttaa

SEQ ID NO: 635 - protein, 200 aa, Brassica napus
MATAGNKNINAKLVLLGDVGAGKSSLVLRFVKDQFVEFQESTIGAAFFSQTLAVNDATVKFEIWDTAGQERYHSLAPMYYRGAAAAIIVFDITNQASFERAKKWVQELQAQGNPNMVMALAGNKADLLDARKVSPEEAETYAQENSLFFMETSAKTATNVKDIFYEIAKRLPRVQPAENPTGMVLPNGPGATAASASCCA

SEQ ID NO: 636 - DNA, 594 bp, Brassica napus
  CDS (1)..(594)
atgagcgcttcgaggttcataaagtgtgtcacagtcggcgatggtgccgtcggaaaaacatgtatgctgatctcttacaccagcaacactttccctacggactatgtaccaactgttttcgacaacttcagtgctaatgttgttgtagatgggaacacagttaatcttggcttgtgggatacagccggtcaagaagactataacaggttaagaccattgagttaccgtggtgcagatgtcttcattcttgctttctcgcttattagcaaagctagctacgagaacatagccaaaaagtggattcctgagctcaggcattatgcacctggtgtccccattatcctcgttggatcaaagcttgatcttcgagatgataagcagttcttcatcgaccatcctggtgctgtccccattactactgctcagggagaggagctgaggaagctaatagatgcacctttttacgtcgaatgcagttccaaatctcaagagaatgtgaaagcggtgtttgacgcagccatacgagtggtcttgcaacctccgaagcagaagaagaagaagagcaaagcgcagaaggcatgctccatcctatga

SEQ ID NO: 637 - protein, 197 aa, Brassica napus
MSASRFIKCVTVGDGAVGKTCMLISYTSNTFPTDYVPTVFDNFSANVVVDGNTVNLGLWDTAGQEDYNRLRPLSYRGADVFILAFSLISKASYENIAKKWIPELRHYAPGVPIILVGSKLDLRDDKQFFIDHPGAVPITTAQGEELRKLIDAPFYVECSSKSQENVKAVFDAAIRVVLQPPKQKKKKSKAQKACSIL

SEQ ID NO: 638 - DNA, 597 bp, Brassica napus
  CDS (1)..(597)
atgagtgcttcaaggttcataaagtgcgtcaccgtcggtgacggcgccgtcggcaagacttgtctactcatctcctacacaagcaacactttccccactgattatgttccaactgtctttgataatttcagtgctaatgtgattgttgatgggaacaccatcaacttgggattgtgggacactgcaggacaagaggactataatagactaagaccattgagctatcgtggtgctgatgtcttcttgctcgcattctctctagtcagcaaagctagctatgaaaatgttgctaaaaagtgggttcctgaactcagacattacgctcctggtgttccaatcatccttgttggaacaaagcttgatcttcgagatgataagcagtactttgttgagcaccctggagctgtgcctatatctactgctcagggtgaagaactgaagaagcttgttggagcttctgcttatatagaatccagtgcaaagacccaacagaatgtaaaagctgtctttgatgcggctattaaagtagttctccagccccctaaaaacaagaagaaaaagaagagaaagtctcagaaaggctgttctatattgtga

SEQ ID NO: 639 - protein, 198 aa, Brassica napus
MSASRFIKCVTVGDGAVGKTCLLISYTSNTFPTDYVPTVFDNFSANVIVDGNTINLGLWDTAGQEDYNRLRPLSYRGADVFLLAFSLVSKASYENVAKKWVPELRHYAPGVPIILVGTKLDLRDDKQYFVEHPGAVPISTAQGEELKKLVGASAYIESSAKTQQNVKAVFDAAIKVVLQPPKNKKKKKRKSQKGCSIL

SEQ ID NO: 640 - DNA, 630 bp, Brassica napus
  CDS (1)..(630)
atgagtgcttcaaagttcattaaatgtgtaactgtcggagacggagctgtcgggaagacatgtatgcttatctgttacactagcaacaagtttcccactgattatataccgactgtgttcgacaacttcagtgccaatgtctccgtggatggacagatcgtgaatctagggctatgggacactgctggtcaagaagattacagtaggttgaggccattgagttacagaggagctgatatcttcgtcttagccttttctcttatcagcaaggccagttacgagaatgtactaaagaagtggatgcctgaacttcgtcggtttgcgcctaatgttcccattgtccttgttggtacaaagctagatctccgtgatgacaagggatacctcgcggatcacaccaatgtcattacctctactcagggagaggaattgaggaagcaaatcggtgcagctgcttacatcgagtgcagttccaagactcaacagaatgtgaaaggagtgtttgacacagcgatcaaagtggttctccagccaccacggaggaaagaggtcactgggaataagaagaaacacagaagatccggctgctcctttgcgagcattgtctgcggaggctgcgccacagcttag

SEQ ID NO: 641 - protein, 209 aa, Brassica napus
MSASKFIKCVTVGDGAVGKTCMLICYTSNKFPTDYIPTVFDNFSANVSVDGQIVNLGLWDTAGQEDYSRLRPLSYRGADIFVLAFSLISKASYENVLKKWMPELRRFAPNVPIVLVGTKLDLRDDKGYLADHTNVITSTQGEELRKQIGAAAYIECSSKTQQNVKGVFDTAIKVVLQPPRRKEVTGNKKKHRRSGCSFASIVCGGCATA

SEQ ID NO: 642 - DNA, 594 bp, Brassica napus
  CDS (1)..(594)
atgagcgcttcgagattcgtaaagtgtgtaacggttggtgatggagctgtcggaaaaacatgtttgttgatttcttacacaagcaacactttccctacggactatgtgcccaccgttttcgataatttcagtgctaatgtggtggttaacggagccaccgttaatcttggattgtgggatactgcagggcaagaggattacaacagattaagaccactaagctaccgtggagcagatgttttcatattggccttctctcttatcagtaaagccagttatgaaaacgtctccaaaaagtggatcccggagttgaaacattacgcgcctggtgtccccatcatccttgttggatcaaagcttgatcttcgagatgataagcagttcttcatcgaccatcctggtgctgtcccaattactactgctcagggagaggagctgaggaagctaatagatgcacctacttacatcgaatgcagttccaaatctcaagagaatgtgaaagctgtctttgacgcagccatacgagtggtgttgcaaccgcctaagcagaagaagaaaaagagcaaagcgcagaaggcatgctccatccaatga

SEQ ID NO: 643 - protein, 197 aa, Brassica napus
MSASRFVKCVTVGDGAVGKTCLLISYTSNTFPTDYVPTVFDNFSANVVVNGATVNLGLWDTAGQEDYNRLRPLSYRGADVFILAFSLISKASYENVSKKWIPELKHYAPGVPIILVGSKLDLRDDKQFFIDHPGAVPITTAQGEELRKLIDAPTYIECSSKSQENVKAVFDAAIRVVLQPPKQKKKKSKAQKACSIQ

SEQ ID NO: 644 - DNA, 636 bp, Brassica napus
  CDS (1)..(636)
atgtcagcttcagtggctgctgcatcagtatcaacaacaacaacagcagctacaacgtttatcaagtgcgtcactgttggcgatggagctgtgggcaaaacttgtcttcttatctcctacaccagcaacacctttcctactgattatgttcctacagtgttcgacaacttcagtgcaaatgttctagtcgatggcaaaaccgtcaatcttggtctttgggatactgctggtcaagaagattacaataggcttagaccattgagttacagaggagcagatgttttcattcttgccttttctcttatcagcaggcctagctttgagaacattgctaaaaagtgggtccctgagctgcgacattatgcccctaacgtgcctattgttctagtgggaactaaattagatctaagagaggataagaagttcccaatgaactatccaggtgcttgcacaatctcaacagaacaaggtcaagagctaagaaaagagataggagcattagcatatatagagtgcagctcaaaaacacaacagaacgtgaaagcggtgtttgatgcagcgataaaagtagttctacagcctcctacaaaaattaagaaacaaaagagaagatttcgtttctgccatgctctctga

SEQ ID NO: 645 - protein, 211 aa, Brassica napus
MSASVAAASVSTTTTAATTFIKCVTVGDGAVGKTCLLISYTSNTFPTDYVPTVFDNFSANVLVDGKTVNLGLWDTAGQEDYNRLRPLSYRGADVFILAFSLISRPSFENIAKKWVPELRHYAPNVPIVLVGTKLDLREDKKFPMNYPGACTISTEQGQELRKEIGALAYIECSSKTQQNVKAVFDAAIKVVLQPPTKIKKQKRRFRFCHAL

SEQ ID NO: 646 - DNA, 591 bp, Brassica napus
  CDS (1)..(591)
atgagtgcttcaaggttcataaagtgcgtcaccgtcggtgacggcgccgtcggcaagacttgtctactcatctcctacacaagcaacactttccccactgattatgttccaactgtctttgataatttcagtgctaatgtgattgttgatgggaacaccatcaacttgggattgtgggacactgcaggacaagaggactataatagactaagaccattgagctatcgtggtgctgatgtcttcttgctcgcattctctctagtcagcaaagctagctatgaaaatgttgctaaaaagtgggttcctgaactcagacattacgctcctggtgttccaatcatccttgttggaacaaagcttgatcttcgagatgataagcagtactttgttgagcaccctggagctgtgcctatatctactgctcagggtgaagaactgaagaagcttgttggagcttctgcttatatagaatccagtgcaaagacccaacagaatgtaaaagctgtctttgatgcggctattaaagtagttctccagccacctaaaaacaaaaacaagagaaaatctcagaaaggatgttccatattgtga

SEQ ID NO: 647 - protein, 196 aa, Brassica napus
MSASRFIKCVTVGDGAVGKTCLLISYTSNTFPTDYVPTVFDNFSANVIVDGNTINLGLWDTAGQEDYNRLRPLSYRGADVFLLAFSLVSKASYENVAKKWVPELRHYAPGVPIILVGTKLDLRDDKQYFVEHPGAVPISTAQGEELKKLVGASAYIESSAKTQQNVKAVFDAAIKVVLQPPKNKNKRKSQKGCSIL

SEQ ID NO: 648 - DNA, 594 bp, Brassica napus
  CDS (1)..(594)
atgagcgcgtcaaggttcataaagtgtgttactgtcggagatggtgctgtcggaaaaacctgcatgctgatctcttacaccagcaacactttccccactgactatgtgccaactgtgttcgacaacttcagtgctaatgtggttgtagatgggaacaccgtcaatcttggcttgtgggacacagctggacaagaagactacaacaggttacgacctctgagttaccgtggcgctgatgttttcattcttgccttctctctcatcagcaaggctagctatgagaatatcgccaaaaagtggattcctgagctgaggcactatgctcctggtgttcccatcatcctcgttggcacaaaacttgaccttcgagatgacaaacaattcttcatagatcatcctggtgctgtacccatcactacaaaccagggagaggagctgaagaaactgattgggtctgcggtctacattgaatgtagttcaaagacacagcaaaatgtgaaggcagtgtttgatgcagccatcaaagtggtgcttcagccaccaaagcagaaaaagaagaagaaaaagaacaagaaccgttgcgccttcttgtga

SEQ ID NO: 649 - protein, 197 aa, Brassica napus
MSASRFIKCVTVGDGAVGKTCMLISYTSNTFPTDYVPTVFDNFSANVVVDGNTVNLGLWDTAGQEDYNRLRPLSYRGADVFILAFSLISKASYENIAKKWIPELRHYAPGVPIILVGTKLDLRDDKQFFIDHPGAVPITTNQGEELKKLIGSAVYIECSSKTQQNVKAVFDAAIKVVLQPPKQKKKKKKNKNRCAFL

SEQ ID NO: 650 - DNA, 648 bp, Brassica napus
  CDS (1)..(648)
atggcttcaagtgcttcaaagttcataaaatgtgtgactgttggtgatggcgccgttggtaaaacctgtatgctcatctgctacaccagcaacaaattccctactgactacataccaacagtttttgacaactttagtgcaaacgttgtagttgaaggcaccactgtgaacctaggcctatgggacactgctgggcaagaagactataacagattaaggcctttaagttacagaggagcagatgttttcgtcttgtctttctcattggtcagccgagctagctacgagaatgtttttaaaaagtggatccctgaactccaacactttgccccaggagttccattagtccttgttggtaccaaattagatctccgtgaagataagcattatttggctgaccatcctggactatcccctgtaactactgcacagggagaggaattgcgtaagctaattggtgcaacatattacattgaatgcagctcaaaaactcaacagaatgtgaaagcagtttttgattcagcaatcaaggaagtgatcaaaccggtggttaaacaaaaggagaagacgaagaaaaagaagaagcaaaagtcaaatcatgggtgtttatcaaacgttctgtgtgggaggatagtgactcggcattga

SEQ ID NO: 651 - protein, 215 aa, Brassica napus
MASSASKFIKCVTVGDGAVGKTCMLICYTSNKFPTDYIPTVFDNFSANVVVEGTTVNLGLWDTAGQEDYNRLRPLSYRGADVFVLSFSLVSRASYENVFKKWIPELQHFAPGVPLVLVGTKLDLREDKHYLADHPGLSPVTTAQGEELRKLIGATYYIECSSKTQQNVKAVFDSAIKEVIKPVVKQKEKTKKKKKQKSNHGCLSNVLCGRIVTRH

SEQ ID NO: 652 - DNA, 594 bp, Brassica napus
  CDS (1)..(594)
atgagcgcatctcggttcataaagtgcgtgacggttggtgacggagcagtgggcaaaacatgtctcctcatctcttacaccagcaacactttccctacggattatgttcccactgttttcgataactttagcgctaatgttgttgttaacggagccactgtcaacttaggactctgggataccgcagggcaggaggattataacagattgagacccttgagttaccgcggtgctgacgttttcatcttagccttctctctcatcagtaaggctagttatgagaatgtctccaagaagtggatccctgagctgacccactatgcccctggtgtccctattgttcttgttggtaccaaactagatcttagggatgacaaacagttcttcgttgaccaccctggtgctgtacctattaccactgctcagggagaggaactaatgaagctaattggagctccttcgtacatcgagtgcagttcaaaatcacaggagaacgtgaagggggtgtttgatgcagcgatcagagtggtacttcaacctccaaagcagaagaaaaagaagagcaaagcacaaaaggcctgctccattttgtga

SEQ ID NO: 653 - protein, 197 aa, Brassica napus
MSASRFIKCVTVGDGAVGKTCLLISYTSNTFPTDYVPTVFDNFSANVVVNGATVNLGLWDTAGQEDYNRLRPLSYRGADVFILAFSLISKASYENVSKKWIPELTHYAPGVPIVLVGTKLDLRDDKQFFVDHPGAVPITTAQGEELMKLIGAPSYIECSSKSQENVKGVFDAAIRVVLQPPKQKKKKSKAQKACSIL

SEQ ID NO: 654 - DNA, 630 bp, Brassica napus
  CDS (1)..(630)
atgagtgcttcaaagttcattaaatgtgtaactgtcggagacggagctgtcgggaagacatgtatgcttatctgttacaccagcaacaagtttcccactgattatataccgactgtgttcgacaacttcagtgccaatgtctccgtggatggacagatcgtgaatctggggctatgggacactgctggtcaagaagattacagtaggttgaggccgttgagttacagaggagctgatatcttcgtcttagccttttctcttatcagcaaggccagttacgagaatgtacttaagaagtggatgcctgaacttcgtaggtttgctccaaatgttcccatagttcttgttggtacaaagctagatcttcgtgatgataagggatacctcgctgatcataccaatgtcattacctctactcagggagaggaattgaggaagcaaatcggtgcagctgcttacatcgagtgcagttccaagactcaacagaatgtgaaagcagtgtttgacacagcgatcaaagtggttctccagccaccgtggaggaaagaggtcactgggaataagaagaaacacagaagatccggttgctcctttgcgagcattgtctgtggaggctgcgccacagcttag

SEQ ID NO: 655 - protein, 209 aa, Brassica napus
MSASKFIKCVTVGDGAVGKTCMLICYTSNKFPTDYIPTVFDNFSANVSVDGQIVNLGLWDTAGQEDYSRLRPLSYRGADIFVLAFSLISKASYENVLKKWMPELRRFAPNVPIVLVGTKLDLRDDKGYLADHTNVITSTQGEELRKQIGAAAYIECSSKTQQNVKAVFDTAIKVVLQPPWRKEVTGNKKKHRRSGCSFASIVCGGCATA

SEQ ID NO: 656 - DNA, 594 bp, Brassica napus
  CDS (1)..(594)
atgagcgcttcgagattcgtaaagtgtgtaacggttggtgatggagctgtcggaaaaacatgtttgttgatttcttacacaagcaacactttccctacggactatgtgcccaccgttttcgataatttcagtgctaatgtggtggttaacggagccaccgttaatcttggattgtgggatactgcagggcaagaggattacaacagactaagaccactgagctatcgtggagcagatgttttcatcttggccttctctcttatcagtaaagccagttatgaaaacgtctccaaaaagtggatccctgagctgaaacattacgctcctggtgtccccatcattctcgttggatcaaagcttgatcttcgagatgataagcagttcttcatcgaccatcctggtgctgtccccattactactgctcagggagaggagctgaggaagcttatagatgcacctacttacgtcgaatgcagttccaaatctcaagagaatgtgaaagcggtgtttgacgcagccatacgagtggtcttgcaacctccgaagcagaagaagaagaagagcaaagcgcagaaggcatgctccatcctatga

SEQ ID NO: 657 - protein, 197 aa, Brassica napus
MSASRFVKCVTVGDGAVGKTCLLISYTSNTFPTDYVPTVFDNFSANVVVNGATVNLGLWDTAGQEDYNRLRPLSYRGADVFILAFSLISKASYENVSKKWIPELKHYAPGVPIILVGSKLDLRDDKQFFIDHPGAVPITTAQGEELRKLIDAPTYVECSSKSQENVKAVFDAAIRVVLQPPKQKKKKSKAQKACSIL

SEQ ID NO: 658 - DNA, 594 bp, Brassica napus
  CDS (1)..(594)
atgagcgcatcgaggttcataaagtgtgtgaccgttggtgacggagctgtgggtaaaacatgtctcctcatttcttacaccagcaacactttccctacggattatgttccgactgtttttgataactttagcgctaatgtggttgttaacggagccactgtcaaccttggcttgtgggataccgctgggcaggaggattataacaggttaagaccattgagttaccgcggtgctgatgttttcatcttagccttctccctcatcagtaaggctagttatgagaatgtctccaagaagtggatccctgagctgactcactatgcccctggtgtcccaattgttcttgttggtaccaaactagatcttagggatgacaaacagttcttcgttgaccaccctggtgctgtacctattaccactgctcagggagaggaactgatgaagctaattggagctccttcgtacatcgagtgcagttcaaaatcacaggagaacgtgaagggggtgtttgatgcagcgattagagtggtacttcaacctccaaagcagaagaaaaagaagggcaaagtacaaaaggcctgctccattttgtaa

SEQ ID NO: 659 - protein, 197 aa, Brassica napus
MSASRFIKCVTVGDGAVGKTCLLISYTSNTFPTDYVPTVFDNFSANVVVNGATVNLGLWDTAGQEDYNRLRPLSYRGADVFILAFSLISKASYENVSKKWIPELTHYAPGVPIVLVGTKLDLRDDKQFFVDHPGAVPITTAQGEELMKLIGAPSYIECSSKSQENVKGVFDAAIRVVLQPPKQKKKKGKVQKACSIL

SEQ ID NO: 660 - DNA, 591 bp, Brassica napus
  CDS (1)..(591)
atgagcgcatcgaggttcataaagtgtgttacagtcggcgatggtgccgtcggaaaaacatgtatgctgatctcttacaccagcaacactttccctacggactatgttccaactgttttcgacaacttcagtgctaacgtggttgttgatgggaacactgtgaatcttggattgtgggatacagctggtcaagaagactataacaggttaagaccattgagttaccgtggtgcagatgtcttcattcttgctttctctcttattagcaaagctagctacgagaacatagccaagaagtggattcctgagctcaggcattatgcccctggagttcctattatcctcgttggaacaaaactcgatcttcgagatgacaagcagttcttcatagaccatcccggtgcagtgccaattactacaaaccagggagaggaactaaagaaactcataggatctccagtttacattgaatgtagttcaaagacgcagcagaatgtcaaagcagtctttgacgcagctattaaagtggtgcttcagccaccaaaatcaaagaagaagaaaaagaacaagaatcgttgcgttttcttgtga

SEQ ID NO: 661 - protein, 196 aa, Brassica napus
MSASRFIKCVTVGDGAVGKTCMLISYTSNTFPTDYVPTVFDNFSANVVVDGNTVNLGLWDTAGQEDYNRLRPLSYRGADVFILAFSLISKASYENIAKKWIPELRHYAPGVPIILVGTKLDLRDDKQFFIDHPGAVPITTNQGEELKKLIGSPVYIECSSKTQQNVKAVFDAAIKVVLQPPKSKKKKKNKNRCVFL

SEQ ID NO: 662 - DNA, 651 bp, Brassica napus
  CDS (1)..(651)
atggcttcaactgcttcaaagttcataaaatgtgtgactgttggtgatggcgccgtaggtaaaacctgtatgctcatctgctacaccagcaacaaattccctactgactacataccaacagtttttgacaactttagtgcaaacgttgtagttgaaggcaccactgtgaacctaggcctatgggacactgctgggcaagaagactacaacagattaaggcctttaagttacagaggagcagatgttttcgtcctgtctttctccttggtcagccgagctagctacgagaatgtttataaaaagtggatccctgaactccaacactttgccccaggagttccattagtccttgttggtaccaaactagatctccgtgaagataataagcattatttggctgaccatcctggactatcccctgtaactactgcacagggagaggaattgcgtaagctaatcggtgcgacatattacattgaatgtagctcgaaaactcaacagaatgtgaaagcagtttttgattcagcgatcaaggaagtgatcaaaccggtggttaaacaaaaggagaagacgcagaaaacgaagaagcaaaagtctaatcatggctgtttatcaaacgttctgtgtgggaggatagtgactcggcattga

SEQ ID NO: 663 - protein, 216 aa, Brassica napus
MASTASKFIKCVTVGDGAVGKTCMLICYTSNKFPTDYIPTVFDNFSANVVVEGTTVNLGLWDTAGQEDYNRLRPLSYRGADVFVLSFSLVSRASYENVYKKWIPELQHFAPGVPLVLVGTKLDLREDNKHYLADHPGLSPVTTAQGEELRKLIGATYYIECSSKTQQNVKAVFDSAIKEVIKPVVKQKEKTQKTKKQKSNHGCLSNVLCGRIVTRH

SEQ ID NO: 664 - DNA, 594 bp, Zea mays
  CDS (1)..(594)
atgagcgcgtctcggttcatcaagtgcgtcaccgtgggggacggtgccgtcggaaagacctgcatgctcatctcctacacatccaacactttccccactgactatgttccaactgtgttcgacaacttcagtgccaatgttgtggttgacgggagcactgtcaacttgggtctgtgggatacagcaggacaagaagattacaatagactgcgtccgttgagctatcgtggtgctgatgtttttctgctcgccttttctcttatcagcaaagcaagctatgagaatgtctctaagaagtgggttcctgaattaaggcactatgctcctggcgtgcccataatccttgttgggacaaaacttgatctgcgtgatgataagcagttttttgttgatcaccctggtgctgttccaatttccactgcccagggcgaagagctgaggaagctaattggtgctgccgcctacatcgaatgcagttcaaaaacccagcagaacataaaagcagtgtttgacgcagcaattaaggtggttctccagccaccaaagcaaaagaagaggaagaagaaggtgcagaagggatgcaccattttgtaa

SEQ ID NO: 665 - protein, 197 aa, Zea mays
MSASRFIKCVTVGDGAVGKTCMLISYTSNTFPTDYVPTVFDNFSANVVVDGSTVNLGLWDTAGQEDYNRLRPLSYRGADVFLLAFSLISKASYENVSKKWVPELRHYAPGVPIILVGTKLDLRDDKQFFVDHPGAVPISTAQGEELRKLIGAAAYIECSSKTQQNIKAVFDAAIKVVLQPPKQKKRKKKVQKGCTIL

SEQ ID NO: 666 - DNA, 591 bp, Glycine max
  CDS (1)..(591)
atgagtacagccaggtttatcaagtgtgtaacagttggagatggtgctgtgggaaagacatgcatgcttatatcctataccagcaatacctttcccacggattatgttccaacagtgtttgacaatttcagtgctaatgtaaccgtggatggtagtacggttaatcttggtttatgggacactgcagggcaagaagattacaataggctgaggcctttaagctatagaggagctgatgtgtttttgttgtgctattctctcatcagcaaagccagttatgagaacatctccaaaaagtggatacctgagctgagacattatgctccaaatgtgcctatagtgctggtgggaacaaaactagatttgcgagatgacaagcaatttctgattgatcatccgggatccgcacgaataacaactgctcagggtgaagaactgaagaaaatgattggtgcagtcacttatattgagtgcagctccaaaacacagcagaatgtgaagacagtttttgatgctgcaataaaggttgcattgaggccaccaaagccaaagaagaaaccacgcaagaaaaagacctgtcctttcctctga

SEQ ID NO: 667 - protein, 196 aa, Glycine max
MSTARFIKCVTVGDGAVGKTCMLISYTSNTFPTDYVPTVFDNFSANVTVDGSTVNLGLWDTAGQEDYNRLRPLSYRGADVFLLCYSLISKASYENISKKWIPELRHYAPNVPIVLVGTKLDLRDDKQFLIDHPGSARITTAQGEELKKMIGAVTYIECSSKTQQNVKTVFDAAIKVALRPPKPKKKPRKKKTCPFL

SEQ ID NO: 668 - DNA, 639 bp, Glycine max
  CDS (1)..(639)
atggcttccgcaactgccccaagattcatcaagtgtgtgaccgttggtgatggagctgtagggaagacctgcatgctcatttgctataccagcaacaaattccccacggactatatccccactgtgtttgataatttcagtgcaaatgtggttgttgaaggcataactgtcaatttaggcctttgggatacagctgggcaagaggattacaacaggctgaggcccttgagctacaggggggcagatgtctttgtcttggctttttctttagttagtcgcgcaagctatgagaatgtgctgaagaagtggatccctgaactccagcattttgcccctggcatcccattggtattagttggcacaaaattggatctgcgcgaagacaggcactatatggctgatcatcctggcttggtgccagtgactactgagcaaggtgaggaactccgtaaacacattggagctacctactatattgagtgcagctcaaaaactcagcagaatgtgaaggcagtttttgatgctgcgatcagaatggtcatcaagcctccacaaaagcaaaacgagaaaaggaagaaaaaaccacgtggctgtttcctaaatgtcctctgtggaaggaacattgttcgtcttaagtga

SEQ ID NO: 669 - protein, 212 aa, Glycine max
MASATAPRFIKCVTVGDGAVGKTCMLICYTSNKFPTDYIPTVFDNFSANVVVEGITVNLGLWDTAGQEDYNRLRPLSYRGADVFVLAFSLVSRASYENVLKKWIPELQHFAPGIPLVLVGTKLDLREDRHYMADHPGLVPVTTEQGEELRKHIGATYYIECSSKTQQNVKAVFDAAIRMVIKPPQKQNEKRKKKPRGCFLNVLCGRNIVRLK

SEQ ID NO: 670 - DNA, 639 bp, Glycine max
  CDS (1)..(639)
atgatgaatgcttcaaagttcattaaatgtgttactgttggagatggagctgttgggaaaacctgcatgctcatttgctacaccagcaacaagttccccactgattacataccaacagtatttgacaatttcagtgccaatgtagctgtggatggaagcattgtcaatttggggctatgggacacagcaggccaggaagactatagcaggttgaggccactgagctatagaggagcagacatttttgtcttagcattctcactgattagcagagctagctatgaaaatgttctcaagaagtggatgccggaattgcgtagatttgcacctaatgttccaattgttcttgttggtacaaagttagatcttcgtgaagaccggggttatgtagctgatcacatgggatctagcgtcataacatctgctgagggggaagaactgaggaaacaaattggtgcagcagcttacatagagtgcagttcaaagactcaacagaatgtcaaagcagtgtttgacactgcaattaaggttgttctccaacctcaacctccaaggaggaaagaaatggcaaggaagaaaaggcatagaaggtctggttgctcatttgtaagtattatgtgcggaggctgtgctgcttaa

SEQ ID NO: 671 - protein, 212 aa, Glycine max
MMNASKFIKCVTVGDGAVGKTCMLICYTSNKFPTDYIPTVFDNFSANVAVDGSIVNLGLWDTAGQEDYSRLRPLSYRGADIFVLAFSLISRASYENVLKKWMPELRRFAPNVPIVLVGTKLDLREDRGYVADHMGSSVITSAEGEELRKQIGAAAYIECSSKTQQNVKAVFDTAIKVVLQPQPPRRKEMARKKRHRRSGCSFVSIMCGGCAA

SEQ ID NO: 672 - DNA, 591 bp, Glycine max
  CDS (1)..(591)
atgagtacagcaagattcatcaagtgtgttactgtcggagatggagccgtgggaaagacctgtatgctcatctcttacaccagcaacacattccccacggattatgttcctacagtttttgacaacttcagtgcaaatgtggtggttgatggaagcacagttaatctcggattatgggacactgctggacaggaggattacaacaggcttaggcccttgagctacagaggagcagatgtgttttttcttgcattttccctcctcagcagagccagctatgaaaatatctctaagaagtggatccctgaactgagacattatgccccaattgtgccaattgtacttgtgggaaccaaacttgatttgagggaagataggcaatatttgattgatcatcctgcggccacacctataactactgctcagggagaagagctgaagaaggaaattggtgctgctgtgtatatagaatgcagctcaaagactcagcagaatgtgaaggctgtgtttgacgctgcaatcaaggttgttctgcagccatcaaagccaaagaaaaaacgaaagaagaacagaacatgcgttttcctttaa

SEQ ID NO: 673 - protein, 196 aa, Glycine max
MSTARFIKCVTVGDGAVGKTCMLISYTSNTFPTDYVPTVFDNFSANVVVDGSTVNLGLWDTAGQEDYNRLRPLSYRGADVFFLAFSLLSRASYENISKKWIPELRHYAPIVPIVLVGTKLDLREDRQYLIDHPAATPITTAQGEELKKEIGAAVYIECSSKTQQNVKAVFDAAIKVVLQPSKPKKKRKKNRTCVFL

SEQ ID NO: 674 - DNA, 603 bp, Glycine max
  CDS (1)..(603)
atggctacgatcggacacaacaatctcaatgccaaattggttcttctcggggacatgggtgctgggaaatccagcctcgttttgcgctttgtcaagggtcaatttctcgaatttcaggaatcaacaataggggcagcgttcttttcacagacgctggcagtaaatgacgcgacggtaaagtttgagatatgggacacagcaggacaagagaggtaccatagcttggctcccatgtattacagaggtgctgctgctgctatcattgtctatgacatcactagctcggactcctttacccgagctaagaagtgggtccaagagcttcaaaaacaagggaatcctaatatggtcatggctcttgctggtaacaaagctgatttggaagacaagaggaaagtgacagctgaagaagcacgtgtatatgctgaagaaaatggtttgtttttcatggagacctctgccaaaactgcatccaacgtgaatgatatattctatgaaatagccaagaggttaccaagggctcagccagctcagaacccagctgggatggtacttgttgatagacccgccgaaggaactagggctgcatcatgttgttcataa

SEQ ID NO: 675 - protein, 200 aa, Glycine max
MATIGHNNLNAKLVLLGDMGAGKSSLVLRFVKGQFLEFQESTIGAAFFSQTLAVNDATVKFEIWDTAGQERYHSLAPMYYRGAAAAIIVYDITSSDSFTRAKKWVQELQKQGNPNMVMALAGNKADLEDKRKVTAEEARVYAEENGLFFMETSAKTASNVNDIFYEIAKRLPRAQPAQNPAGMVLVDRPAEGTRAASCCS

SEQ ID NO: 676 - DNA, 609 bp, Glycine max
  CDS (1)..(609)
atgaatcccgagtatgattatctgttcaagctccttcttattggagactctggtgttggtaaatcatgccttcttctgagattttctgatgattcgtacatcgaaagctacataagcaccattggagttgattttaaaatacgtactgttgagcaagatggaaagaccattaaactacagatctgggacacagctgggcaagaacgatttaggacaatcaccagtagctactaccgtggtgcccatgggatcattattgtttatgatgtgacagatgaagagagcttcaataatgtgaagcagtggctcagtgaaattgatcgctatgcaagtgataatgttaacaagcttttggttggcaacaagtgtgatctggaagcaaatagagcagtgtcatatgaaacagctaaggcattcgcagatgaaataggcataccttttatggaaacaagtgcaaaagatgctacaaatgttgaacaggctttcatggcaatggctgcttcaatcaaggatagaatggcaagccaacctgcaaacaatgcaaggcctccaacagtgcagatcaggggacagccagttgcacagaaaggtgggtgctgctcttcctaa

SEQ ID NO: 677 - protein, 202 aa, Glycine max
MNPEYDYLFKLLLIGDSGVGKSCLLLRFSDDSYIESYISTIGVDFKIRTVEQDGKTIKLQIWDTAGQERFRTITSSYYRGAHGIIIVYDVTDEESFNNVKQWLSEIDRYASDNVNKLLVGNKCDLEANRAVSYETAKAFADEIGIPFMETSAKDATNVEQAFMAMAASIKDRMASQPANNARPPTVQIRGQPVAQKGGCCSS

SEQ ID NO: 678 - DNA, 594 bp, Glycine max
  CDS (1)..(594)
atgagtgcgtccaggttcatcaagtgtgtcactgagggtgacggtgccgttggcaagacttgcatgctcatctcctacaccagcaacacttttcctacggactacgtgccaactgtctttgacaatttcagtgcaaatgtagttgtggatggaagcactgtgaatcttgggttgtgggatactgctggccaagaagattacaatagattaagacccttaagctatcgtggagcagatgtattcctgcttgctttctctctcataagcagggctagctatgaaaatgttgccaagaaatggattcctgagttgaggcattatgctcctggtgttccaattattcttgttggaacaaaacttgatcttcgggatgataagcagttctttcaagaccatcctggtgcagtgcctatcaccacagcacagggtgaggagctgagaaagcttatcggtgctccagtttacattgaatgtagttcaaaaacgcaacagaatgtgaaggctgtttttgatgcggccatcaaggtagttctccagcccccaaaacagaagaaaaagaagagaaaggggcaaaaggcctgttccattttgtga

SEQ ID NO: 679 - protein, 197 aa, Glycine max
MSASRFIKCVTEGDGAVGKTCMLISYTSNTFPTDYVPTVFDNFSANVVVDGSTVNLGLWDTAGQEDYNRLRPLSYRGADVFLLAFSLISRASYENVAKKWIPELRHYAPGVPIILVGTKLDLRDDKQFFQDHPGAVPITTAQGEELRKLIGAPVYIECSSKTQQNVKAVFDAAIKVVLQPPKQKKKKRKGQKACSIL

SEQ ID NO: 680 - DNA, 627 bp, Glycine max
  CDS (1)..(627)
atggattcgagttcaacccaggaattcgaatatttgtttaagttgttgatgattggggactcaggtgttggcaagagtagtctcctcctctgtttcacatctgattcctttgaagatctttctcccacaattggtgttgattttaaagtcaagtatttgacaatggaaggtaaaaagctgaagcttgccatttgggatacagctggtcaagagagattcagaacattgacaagttcttactaccgaggtgctcaagggatcattatggcttatgatgtaactcggcgggaaacgtttacaaatctctctgaaatatgggcaaaggaaatagacctttattcaactaatcaagattgcatcaagatgcttgttggaaacaaactagataaggagggtgatagagttgtgacaaagaaagagggaatagactttgccagggaatacggttgcctatttattgaatgcagtgctaaaactcgagttaatgttcagcaatgctttgaagagcttgttttgaagattctggatacacctagcctcatagccgagggctcaaagggtgttaaaaagaacattttcaaggacaggccaccccagtctgatgcatccgcaagtagttgttgctga

SEQ ID NO: 681 - protein, 208 aa, Glycine max
MDSSSTQEFEYLFKLLMIGDSGVGKSSLLLCFTSDSFEDLSPTIGVDFKVKYLTMEGKKLKLAIWDTAGQERFRTLTSSYYRGAQGIIMAYDVTRRETFTNLSEIWAKEIDLYSTNQDCIKMLVGNKLDKEGDRVVTKKEGIDFAREYGCLFIECSAKTRVNVQQCFEELVLKILDTPSLIAEGSKGVKKNIFKDRPPQSDASASSCC

SEQ ID NO: 682 - DNA, 630 bp, Glycine max
  CDS (1)..(630)
atgaatgcttcaaagttcattaaatgtgttactgttggagatggagctgttgggaaaacctgcatgctcatttgctacaccagcaacaagttccccactgattacataccaacagtatttgacaatttcagtgccaatgtagctgtggatggaagcattgtcaatttggggctatgggacacagcaggccaggaagactatagcaggttgaggccactgagctatagaggagcagacatttttgtcttagcattctcactgattagcagagctagctatgaaaatgttctcaagaagtggatgccggaattgcgtagatttgcacctaatgttccaattgttcttgttggtacaaagttagatcttcgtgaagaccggggttatgtagctgatcacatgggatctagcgtcataacatctgctgagggggaagaactgaggaaacaaattggtgcagcagcttacatagagtgcagttcaaagactcaacagaatgtcaaagcagtgtttgacactgcaattaaggttgttctccaacctccaaggaggaaagaaatggcaaggaagaaaaggcatagaaggtctggttgctcatttgtaagtatcatgtgcggaggctgtgctgcttaa

SEQ ID NO: 683 - protein, 209 aa, Glycine max
MNASKFIKCVTVGDGAVGKTCMLICYTSNKFPTDYIPTVFDNFSANVAVDGSIVNLGLWDTAGQEDYSRLRPLSYRGADIFVLAFSLISRASYENVLKKWMPELRRFAPNVPIVLVGTKLDLREDRGYVADHMGSSVITSAEGEELRKQIGAAAYIECSSKTQQNVKAVFDTAIKVVLQPPRRKEMARKKRHRRSGCSFVSIMCGGCAA

SEQ ID NO: 684 - DNA, 609 bp, Glycine max
  CDS (1)..(609)
atgaatcccgagtatgataatctgttcaagctccttcttattggagactctggtgttggtaaatcatgccttcttctgagatttgctgatgattcgtacatcgagagctacataagcaccattggagttgattttaaaatacgtactgttgagcaggatggaaagaccattaaactacagatctgggacacagccgggcaagaacgatttaggacaatcaccagtagctactatcgtggggcccatgggatcattattgtttatgatgtgacagatgaagagagcttcaataatgtgaagcagtggctcagtgaaattgatcgctatgcaagtgataatgttaacaagcttttggttggaaacaagtgtgatctggaagcaaatagagctgtgtcatatgaaacagctaaagcattcgcagatgaaataggcataccttttatggaaacaagtgcaaaagatgctacaaatgttgaacaggctttcatggcaatggctgcttcaatcaaggatagaatggcaagccaacctgcaaacaatgcaaggcctccaacagtgcagatcaggggacagccagttgcacagaaaggtgggtgctgctcttcctaa

SEQ ID NO: 685 - protein, 202 aa, Glycine max
MNPEYDNLFKLLLIGDSGVGKSCLLLRFADDSYIESYISTIGVDFKIRTVEQDGKTIKLQIWDTAGQERFRTITSSYYRGAHGIIIVYDVTDEESFNNVKQWLSEIDRYASDNVNKLLVGNKCDLEANRAVSYETAKAFADEIGIPFMETSAKDATNVEQAFMAMAASIKDRMASQPANNARPPTVQIRGQPVAQKGGCCSS

SEQ ID NO: 686 - DNA, 594 bp, Glycine max
  CDS (1)..(594)
atgagcacaacacggtttattaagtgtgtcacagttggtgatggggctgtgggaaagacttgcatgcttatctcttacactagcaacactttccccacggattatgttcctacagttttcgacaatttcagtgcaaatgttgtggttgatggcagcacagttaacctgggattgtgggacactgctggacaggaagattacaacaggcttaggccattgagttacagaggagcagatgtgttcttgctggccttttccctcatcagcaaagccagctatgaaaatatatctaaaaagtggattcctgaattgagacattatgccccaactgtgcctattgtacttgttggaactaaacttgatttgagggaagacaggcaatatttgattgatcatcctggaaccacacctatagctactgcccagggagaagaactgaagaaggcaattggtgctgctgtgtacatagagtgcagctcaaagactcagcagaatgtgaaggccgtgtttgatgctgcaatcaaggttgttttgcaaccacctaagtccaagaaaaaaggaaagaagaagaacacgccttgtgttttcctctga

SEQ ID NO: 687 - protein, 197 aa, Glycine max
MSTTRFIKCVTVGDGAVGKTCMLISYTSNTFPTDYVPTVFDNFSANVVVDGSTVNLGLWDTAGQEDYNRLRPLSYRGADVFLLAFSLISKASYENISKKWIPELRHYAPTVPIVLVGTKLDLREDRQYLIDHPGTTPIATAQGEELKKAIGAAVYIECSSKTQQNVKAVFDAAIKVVLQPPKSKKKGKKKNTPCVFL

SEQ ID NO: 688 - DNA, 609 bp, Glycine max
  CDS (1)..(609)
atgaatcccgagtatgattatctgttcaagctccttcttattggagactctggtgttggtaaatcatgccttcttctgagatttgctgatgattcgtacatcgagagctacataagcaccattggagttgattttaaaatacgtactgttgagcaggatggaaagaccattaaactacagatctgggacacagccgggcaagaacgatttaggacaatcaccagtagctactatcgtggggcccatgggatcattattgtttatgatgtgacagatgaagagagcttcaataatgtgaagcagtggctcagtgaaattgatcgctatgcaagtgataatgttaacaagcttttggttggaaacaagtgtgatctggaagcaaatagagctgtgtcatatgaaacagctaaagcattcgcagatgaaataggcataccttttatggaaacaagtgcaaaagatgctacaaatgttgaacaggctttcatggcaatggctgcttcaatcaaggatagaatggcaagccaacctgcaaataatgcaaggcctccaacagtgcagatcaggggtcagccagttgcacagaaaggtgggtgctgctcttcctga

SEQ ID NO: 689 - protein, 202 aa, Glycine max
MNPEYDYLFKLLLIGDSGVGKSCLLLRFADDSYIESYISTIGVDFKIRTVEQDGKTIKLQIWDTAGQERFRTITSSYYRGAHGIIIVYDVTDEESFNNVKQWLSEIDRYASDNVNKLLVGNKCDLEANRAVSYETAKAFADEIGIPFMETSAKDATNVEQAFMAMAASIKDRMASQPANNARPPTVQIRGQPVAQKGGCCSS

SEQ ID NO: 690 - DNA, 591 bp, Glycine max
  CDS (1)..(591)
atgagtacggcaaggtttatcaagtgtgtaacagttggagatggtgctgtgggaaagacatgcatgcttatatcctataccagcaatacctttcccacggattatgttccaacagtgtttgacaatttcagtgctaatgtaacggtggatggtagtactgttaatcttggtttatgggacactgcagggcaagaagattacaacaggctaaggcctttaagctatagaggagctgatgtgtttttgttgtgctattctctcatcagcaaagccagttatgagaacatctccaaaaagtggatacctgagctgagacattatgctccaaatgtgcctatagtgctggtgggaacaaaactagatttgcgagatgacaagcaatttctgattgatcatccgggatccgcacgaataacaactgctcagggtgaagaattgaagaaaatgattggtgcagtcacttatattgagtgcagctccaaaacacagctgaatgtgaagacagtttttgatgctgcaataaaggttgcattgaagccaccaaagccaaagaagaaaccacgcaagaaaaggacctgtactttcctctga

SEQ ID NO: 691 - protein, 196 aa, Glycine max
MSTARFIKCVTVGDGAVGKTCMLISYTSNTFPTDYVPTVFDNFSANVTVDGSTVNLGLWDTAGQEDYNRLRPLSYRGADVFLLCYSLISKASYENISKKWIPELRHYAPNVPIVLVGTKLDLRDDKQFLIDHPGSARITTAQGEELKKMIGAVTYIECSSKTQLNVKTVFDAAIKVALKPPKPKKKPRKKRTCTFL

SEQ ID NO: 692 - DNA, 609 bp, Glycine max
  CDS (1)..(609)
atgaatcccgagtatgattatctgttcaagctccttcttattggagactctggtgttggtaaatcatgccttcttctgagattttctgatgattcgtacatcgaaagctacataagcaccattggagttgattttaaaatacgtaccgttgagcaagatggaaagaccattaaactacagatctgggacacagctgggcaagaacgatttaggacaatcaccagtagctactaccgtggtgcccatgggatcattattgtttatgatgtgacagatgaagagagcttcaataatgtgaagcagtggctcagtgaaattgatcgctatgcaagtgataatgttaacaagcttttggttggcaacaagtgtgatctggaagcaaatagagcagtgtcatatgaaacagctaaggcatttgcagatggaataggcataccttttatggaaacaagtgcaaaagatgctacaaatgtcgaacaggctttcatggcaatgactgcttcaatcaaggatagaatggcaagccaacctgcaaataatgcaaggcctccaacagtgcagatcaggggtcagccagttgcacagaaaggtgggtgctgctctttctga

SEQ ID NO: 693 - protein, 202 aa, Glycine max
MNPEYDYLFKLLLIGDSGVGKSCLLLRFSDDSYIESYISTIGVDFKIRTVEQDGKTIKLQIWDTAGQERFRTITSSYYRGAHGIIIVYDVTDEESFNNVKQWLSEIDRYASDNVNKLLVGNKCDLEANRAVSYETAKAFADGIGIPFMETSAKDATNVEQAFMAMTASIKDRMASQPANNARPPTVQIRGQPVAQKGGCCSF

SEQ ID NO: 694 - DNA, 591 bp, Glycine max
  CDS (1)..(591)
atgagtacagcaagattcatcaagtgtgttactgtgggagatggagccgtgggaaagacatgtatgctcatctcttacaccagcaacacattccccacggactatgtgcctacagtttttgacaacttcagtgcaaatgtggtgattgatggaagcacagttaatctaggattatgggacactgctggacaggaggattacaacaggcttaggcctttgagctacagaggagcagatgtgtttttgctggcattttccctcctcagcagagccagctatgaaaatatctctaagaagtggatccctgaactgagacattatgccccaattgtgccaattgtacttgtgggaaccaaacttgatttgagggaagataggcaatatttgattgatcatcctgcggccacacctataactactgctcagggagaagagctgaagaaggaaattggtgctgctgtgtatatagaatgcagctcaaagactcagcagaatgtgaaggctgtgtttgacgctgcaatcaaggttgttctgcagccatcaaagccaaagaaaaaacgaaagaagaacagaacatgcgttttcctttaa

SEQ ID NO: 695 - protein, 196 aa, Glycine max
MSTARFIKCVTVGDGAVGKTCMLISYTSNTFPTDYVPTVFDNFSANVVIDGSTVNLGLWDTAGQEDYNRLRPLSYRGADVFLLAFSLLSRASYENISKKWIPELRHYAPIVPIVLVGTKLDLREDRQYLIDHPAATPITTAQGEELKKEIGAAVYIECSSKTQQNVKAVFDAAIKVVLQPSKPKKKRKKNRTCVFL

SEQ ID NO: 696 - DNA, 612 bp, Helianthus annuus
  CDS (1)..(612)
atgaatcacgaatatgattacttgttcaagcttttgctgattggggattcgggagtcggcaaatcttgtctcctacttagatttgctgatgactcatatattgacagctacatcagcacaattggtgtggactttaaaatccgcaccgttgagcaggatggaaaaaccattaagcttcaaatttgggacacagctggacaagaaaggttcaggacaattaccagtagctactaccgtggggcccatggcattatcatagtttacgatgttactgacctagacagtttcaacaacgttaagcaatggttgagtgaaattgaccgttatgcaagtgaaaatgtgaataaacttcttgttggaaacaaatgtgaccttacagaaagtagagccgtgtcctatgatactgctaaggaatttgcggataacattggcattccgtttatggaaactagtgccaaagatgctaccaatgttgagcaggctttcatggccatgtcctctgacatcaaaaacaggatggcaagtcagcctggggcaaacaacacgaggccaccttctgtgcagctcaagggtcaacctgttggtcaaaagggcggttgctgctcatcttag

SEQ ID NO: 697 - protein, 203 aa, Helianthus annuus
MNHEYDYLFKLLLIGDSGVGKSCLLLRFADDSYIDSYISTIGVDFKIRTVEQDGKTIKLQIWDTAGQERFRTITSSYYRGAHGIIIVYDVTDLDSFNNVKQWLSEIDRYASENVNKLLVGNKCDLTESRAVSYDTAKEFADNIGIPFMETSAKDATNVEQAFMAMSSDIKNRMASQPGANNTRPPSVQLKGQPVGQKGGCCSS

SEQ ID NO: 698 - DNA, 615 bp, Hordeum vulgare
  CDS (1)..(615)
atgagcgcctccgagtacgactacctcttcaagctgctcctcatcggcgactcctccgtcggcaagtcctgcctcctcctccgcttcgccgacgatgcgtacgtcgacacctacatcagcaccatcggagttgatttcaaaatacggacagtcgagctcgacggcaagtcggtgaagctgcagatttgggacacagcaggccaggaaaggttcaggacaataacgagcagttactaccggggagcgcatggaatcattatcgtatatgacgtgacagatagggaaagcttcaacaatgtcaagcagtggttgagtgagattgataggtatgccagtgacagtgtgtgcaagcttctagtcgggaacaaatgtgatttggttgacagtaaggtcgtcgatacagaggaggccaaggcttttgcagaatcattaggaatgaatttcctggagacaagtgcaaaggagtccatcaatgtggagacagctttcttaaccatgtcatcagaaatcaagaacaagatggcgagccaacctgcagcggagcggaaatcgacggtccatgttcacatgaaagggcagcccatacagcagcagcagagcagctgctgctcctga

SEQ ID NO: 699 - protein, 204 aa, Hordeum vulgare
MSASEYDYLFKLLLIGDSSVGKSCLLLRFADDAYVDTYISTIGVDFKIRTVELDGKSVKLQIWDTAGQERFRTITSSYYRGAHGIIIVYDVTDRESFNNVKQWLSEIDRYASDSVCKLLVGNKCDLVDSKVVDTEEAKAFAESLGMNFLETSAKESINVETAFLTMSSEIKNKMASQPAAERKSTVHVHMKGQPIQQQQSSCCS

SEQ ID NO: 700 - DNA, 642 bp, Hordeum vulgare
  CDS (1)..(642)
atggcgtccagcgcctcccggttcatcaagtgcgtcaccgtcggggacggcgccgtcggcaagacctgcatgctcatctgctacaccagcaacaagttccccaccgactacgtgcccaccgtgttcgacaatttcagagcgaacgtggtggtggacggcaccaccgtgaacctgggcctctgggacactgcagggcaggaggactacaacagattgagaccgctgagctaccggggagccgacgtcttcgtgctctccttctcgctcgtcagccgagccagctacgagaatgtcatgaagaagtggctaccggagcttcagcaccatgcacccggcgtgccaacagtgctggttggtacaaagctagatctacgtgaagacaagcaatacttacttgaccaccccggcgtggtgcctgttactacagctcagggggaggaactccgcaagcacatcggtgcaacttgttatgtcgaatgcagctcaaagacacagcagaatgtcaaagctgtgtttgatgctgccatcaaggtagtgatcaaacctccaacaaagcagagggaaaggaggaagaagaaagcacggcaaggatgtgcatcattgggtaccctgtcaagaaggaagctggcatgcttcaagtga

SEQ ID NO: 701 - protein, 213 aa, Hordeum vulgare
MASSASRFIKCVTVGDGAVGKTCMLICYTSNKFPTDYVPTVFDNFRANVVVDGTTVNLGLWDTAGQEDYNRLRPLSYRGADVFVLSFSLVSRASYENVMKKWLPELQHHAPGVPTVLVGTKLDLREDKQYLLDHPGVVPVTTAQGEELRKHIGATCYVECSSKTQQNVKAVFDAAIKVVIKPPTKQRERRKKKARQGCASLGTLSRRKLACFK

SEQ ID NO: 702 - DNA, 615 bp, Hordeum vulgare
  CDS (1)..(615)
atggcggccagcgccggcagcaagatccgcaacgccaagctggttcttctcggcgatgtgggtgctgggaaatccagcctggtgcttcggttcgtaaaaggacaatttgttgagttccaggaatcgacaattggagcggctttcttctctcaaacactggctgttaatgacgagactgtgaagtttgaaatctgggatactgctgggcaggagaggtatcatagcttggcccccatgtactataggggtgctgccgcagccatagttgtctatgacatctcgaaccaggcatccttcacccgagcaaagaaatgggttcaagaacttcaagctcaaggaaaccagaatacagtagtggctcttgctggcaacaaagctgatttgctagaggcgagggaggttcaaatagaggaagccaagacatatgcgcaggagaatggcctcttcttcatggaaacgtctgccaagactgcaaccaatgtgaatgacatattttatgagattgcgaagagactgctgcaagggcaggcggcgcagaacccacaggcggcggggatggttctctcccagagacccaacgagagagtggtcagcgcggcttcgtgctgctcctga

SEQ ID NO: 703 - protein, 204 aa, Hordeum vulgare
MAASAGSKIRNAKLVLLGDVGAGKSSLVLRFVKGQFVEFQESTIGAAFFSQTLAVNDETVKFEIWDTAGQERYHSLAPMYYRGAAAAIVVYDISNQASFTRAKKWVQELQAQGNQNTVVALAGNKADLLEAREVQIEEAKTYAQENGLFFMETSAKTATNVNDIFYEIAKRLLQGQAAQNPQAAGMVLSQRPNERVVSAASCCS

SEQ ID NO: 704 - DNA, 639 bp, Linum usitatissimum
  CDS (1)..(639)
atgggatcttcttcaggtagtagtgggtatgatctgtcgttcaagttgttgttgattggagattcaagtgttggcaaaagcagcctgcttgtcagcttcatctccaccacctctgctgaagaagatcttgctcccaccattggtgtggacttcaagatcaagcagctgacagtagctggcaagagattgaagctcaccatttgggatactgctgggcaggagaggttcaggacactaacaagctcttactacaggaatgcacagggaatcatacttgtttatgacgtgacaaggagagagacctttacgaacctatcggacgtatgggctaaagaagttgagctctactgcacaaaccaggactgtgtcaagatgcttgttggcaacaaagttgacaaagactctgacagaactgtaaccagagaagaaggaatggaacttgcaaaacagcacggatgtttgttcctcgagtgcagtgccaaaactcgtgaaaacgtggagcaatgcttcgaggagctcgcgcaaaagataaaggatgttccaagtctcttggaagaaggatctacagccgggaagaggaacattctaaagcaaaacccagatcgacaaatgtctcaaagcaacggctgttgctcttaa

SEQ ID NO: 705 - protein, 212 aa, Linum usitatissimum
MGSSSGSSGYDLSFKLLLIGDSSVGKSSLLVSFISTTSAEEDLAPTIGVDFKIKQLTVAGKRLKLTIWDTAGQERFRTLTSSYYRNAQGIILVYDVTRRETFTNLSDVWAKEVELYCTNQDCVKMLVGNKVDKDSDRTVTREEGMELAKQHGCLFLECSAKTRENVEQCFEELAQKIKDVPSLLEEGSTAGKRNILKQNPDRQMSQSNGCCS

SEQ ID NO: 706 - DNA, 651 bp, Linum usitatissimum
  CDS (1)..(651)
atggctggctaccgacctgaagaagactacgattacttgctcaagctcgttctgatcggcgattccggtgtcggcaaatccaacttgctctccaggttcaccaagaacgagttcaatctcgagtccaagtccactatcggggtcgagttcgccaccaagagcatgaacctcgatggcaaggtcatcaaggctcagatttgggacaccgctggccaagaaaggtaccgcgccataacaagcgcatactacagaggagcggtcggtgctttactcgtctacgacgtgactcgccgctcaatattcgaaaacgtggcgaggtggctgaaagagttgagggagcacaccgaccccaacatcgtcgtcatgctcataggcaacaaatcagatctcaggcacctggtagctgtccagaccgaggatgcgaaagcatatgcagagagggagtccatgtacttcatggagacatcagctctcaccgcaacaaacgtggagagtgccttcaccgaagtcatgacgcagatatacaagatcgtgagcaagagggctgtcgatggaaccaatgacggtacgacaggagtacctctgaagggagagaccatcaacgtgaagcaggaaggttctgttctcaagagaatggggtgctgttcttag

SEQ ID NO: 707 - protein, 216 aa, Linum usitatissimum
MAGYRPEEDYDYLLKLVLIGDSGVGKSNLLSRFTKNEFNLESKSTIGVEFATKSMNLDGKVIKAQIWDTAGQERYRAITSAYYRGAVGALLVYDVTRRSIFENVARWLKELREHTDPNIVVMLIGNKSDLRHLVAVQTEDAKAYAERESMYFMETSALTATNVESAFTEVMTQIYKIVSKRAVDGTNDGTTGVPLKGETINVKQEGSVLKRMGCCS

SEQ ID NO: 708 - DNA, 597 bp, Linum usitatissimum
  CDS (1)..(597)
atgagtgcttccaggttcataaagtgcgtcactgtcggcgatggcgccgtcggcaagacctgcttgctcatttcctataccagcaacaccttccccacggactatgtaccgactgtattcgacaatttcagcgcgaatgttgtcgtggatggaagcactgttaacttgggattatgggatactgctggtcaggaggattacaacaggctgaggccattgagttatcgaggagcagatgtctttattcttgcattttctctgattagcaaggccagctatgaaaacattgccaaaaagtggatccctgaattgaggcattatgcacctggggttccaattatcatcgtaggaacaaagcttgatcttcgcgaggataagcaattctttgatgaccatcccggtgctgtacccatcacaactgctcagggggaggaactgaagaaactgattggagcgcaggcttatgtggaatgcagttccaaaacgcagcagaatgtgaaggctgtgtttgatgcagcaataaaggtagtgcttcaacctccaaagcaaaagaagaaaaagaggaagggaaaacaaaagaattgttctatactgtaa

SEQ ID NO: 709 - protein, 198 aa, Linum usitatissimum
MSASRFIKCVTVGDGAVGKTCLLISYTSNTFPTDYVPTVFDNFSANVVVDGSTVNLGLWDTAGQEDYNRLRPLSYRGADVFILAFSLISKASYENIAKKWIPELRHYAPGVPIIIVGTKLDLREDKQFFDDHPGAVPITTAQGEELKKLIGAQAYVECSSKTQQNVKAVFDAAIKVVLQPPKQKKKKRKGKQKNCSIL

SEQ ID NO: 710 - DNA, 612 bp, Linum usitatissimum
  CDS (1)..(612)
atgaactctgagtacgattacttgttcaagcttttgcttatcggagattccggagtcggcaagtcatgtctacttttgcgattcgctgatgattcgtacttggacagttacatcagtaccatcggagtggacttcaaaattcgcaccgtggagcaggatggcaaaaccattaagctccaaatctgggatacggcagggcaagaacgattcaggaccattacaagtagttactatcgtggtgctcatgggattattgtggtctatgatgtcacagaccaagagagtttcaacaatgtcaaacagtggttgagtgaaattgatcgctacgcaagtgagaacgtgaacaaacttctagttgggaacaagagtgacctcactgccaacaaagttgtttcatatgaaactgctaaggcatttgccgatgaaattgggattcccttcatggagacgagtgccaagaacgcttccaatgtcgaagatgcttttatggcaatgtcagctgcaatcaagaccaggatggctagccaacctgtgtcaggcactgccagacctccaacggtgcaaatccgcggagaaccagtgaaccagaagtcaggttgctgctcttcttga

SEQ ID NO: 711 - protein, 203 aa, Linum usitatissimum
MNSEYDYLFKLLLIGDSGVGKSCLLLRFADDSYLDSYISTIGVDFKIRTVEQDGKTIKLQIWDTAGQERFRTITSSYYRGAHGIIVVYDVTDQESFNNVKQWLSEIDRYASENVNKLLVGNKSDLTANKVVSYETAKAFADEIGIPFMETSAKNASNVEDAFMAMSAAIKTRMASQPVSGTARPPTVQIRGEPVNQKSGCCSS

SEQ ID NO: 712 - DNA, 639 bp, Linum usitatissimum
  CDS (1)..(639)
atgggatcttcttcaggtagtagtgggtatgatctgtcgttcaagttgttgttgattggagattcaagtgttggcaaaagcagcctgcttgtcagcttcatctccaccacctctgctgaagaagatcttgctcccaccattggtgtggacttcaagatcaagcagctgacagtagctggcaagagattgaagctcaccatttgggatactgctgggcaggagaggttcaggacactaacaagctcttactacaggaatgcacagggtatcatacttgtttatgacgtgaccaggagagagacctttacgaacctatcggacgtatgggctaaagaagttgagctctactgcacaaaccaggactgtgtcaagatgcttgttggcaacaaagttgacaaagactctgacagaactgtaaccagagaagaaggaatggaacttgcaaaagagcgtggatgtttgttcctcgagtgcagtgccaaaactcgtgaaaacgtggagcaatgcttcgaggagcttgcgcaaaagataaaggatgttccaagtctcttggaagaaggatctacggccgggaagaggaacattctaaagcaaaacccagatcgccaaatgtctcaaagcaacggctgttgctcttaa

SEQ ID NO: 713 - protein, 212 aa, Linum usitatissimum
MGSSSGSSGYDLSFKLLLIGDSSVGKSSLLVSFISTTSAEEDLAPTIGVDFKIKQLTVAGKRLKLTIWDTAGQERFRTLTSSYYRNAQGIILVYDVTRRETFTNLSDVWAKEVELYCTNQDCVKMLVGNKVDKDSDRTVTREEGMELAKERGCLFLECSAKTRENVEQCFEELAQKIKDVPSLLEEGSTAGKRNILKQNPDRQMSQSNGCCS

SEQ ID NO: 714 - DNA, 684 bp, Glycine max
  CDS (1)..(684)
atggctgctgcaactgccccaaggttcatcaagtgtgtgacagtcggggatggagctgtaggcaaaacttgcatgctcatttgctatacaagcaacaaattccccacggactatattccaacggtgtttgataatttcagtgcaaatgtggttgttgaaaacacaactgtcaatttaggcctctgggacactgctgggcaagaggattacaacaggctgaggccattgagctacaggggggcagatgtctttgtcttggctttctctttagttagccatgcaagctacgaaaatgtgttgaagaagtgggttcctgaactgcagcattttgctcctggtgtcccagtggtgctagttggcaccaaattggatcttcgagaagacaagcactatttggctgatcatcctggtctggcgcctgtgacttctgagcaaggtgaggaattgcgtaaactggtcggagctacgtattatatagagtgcagctcaaagactcagcagaatgtgaagtcagtttttgatgctgctatcaaggtggtcatcgagcctccacaaaaacatgagaagaagaaaaaaccacgtcgagggtgtctactgtcagtacacttttttcatatcataacaactcctgcacgtgaaactttcttacttgtgaaaagggatagatcattaagtgttcattga

SEQ ID NO: 715 - protein, 227 aa, Glycine max
MAAATAPRFIKCVTVGDGAVGKTCMLICYTSNKFPTDYIPTVFDNFSANVVVENTTVNLGLWDTAGQEDYNRLRPLSYRGADVFVLAFSLVSHASYENVLKKWVPELQHFAPGVPVVLVGTKLDLREDKHYLADHPGLAPVTSEQGEELRKLVGATYYIECSSKTQQNVKSVFDAAIKVVIEPPQKHEKKKKPRRGCLLSVHFFHIITTPARETFLLVKRDRSLSVH

SEQ ID NO: 716 - DNA, 654 bp, Oryza sativa
  CDS (1)..(654)
atggattcttcgtcttcatcgtcgtccacccaggcgcagagccagccggattttgattacctctttaagctgctcctcatcggcgactcgggcgtcggcaagagcagtctcctcctccgcttcacctccgactctttcgaggatctctcgcccaccataggtgtcgacttcaaggtcaagatggttaacaccggtggcaaaaaactcaagcttgccatctgggacacagctggacaggagcgatttagaaccttgaccagctcatactacagaggtgcacagggtattattatggtgtacgatgtcactcgacgggaaacattcaccaatctttctgacatatgggctaaggaaattgacctctattctacaaaccaggattgtattaagatgcttgtcggaaacaaagttgacaaggaaagtgagagagctgtgacaaaaaaagagggcattgaatttgccagggaatacgggtgtttatttctagaatgcagtgctaaaaccaaagtgaatgttgaacaatgctttgaggaactcgtcctgaagatattggacacaccaagcctcttggctgatgcttcctcaggtgcgaagaagaacatcttcaagcagaagccgccagaagccgatgctgccgctagcagctgctgttaa

SEQ ID NO: 717 - protein, 217 aa, Oryza sativa
MDSSSSSSSTQAQSQPDFDYLFKLLLIGDSGVGKSSLLLRFTSDSFEDLSPTIGVDFKVKMVNTGGKKLKLAIWDTAGQERFRTLTSSYYRGAQGIIMVYDVTRRETFTNLSDIWAKEIDLYSTNQDCIKMLVGNKVDKESERAVTKKEGIEFAREYGCLFLECSAKTKVNVEQCFEELVLKILDTPSLLADASSGAKKNIFKQKPPEADAAASSCC

SEQ ID NO: 718 - DNA, 612 bp, Zea mays
  CDS (1)..(612)
atgaatcccgagtacgactaccttttcaaacttctgcttattggtgattctggtgttgggaaatcatgcttgcttctcagatttgcggatgattcatatttggacagctacatcagcacaattggggttgattttaaaattcggacagtagagcaagatgggaagaccataaaacttcaaatttgggatactgctgggcaagagcgcttcaggaccatcactagcagctactaccgtggagctcatggaatcattattgtatatgacgtgacagaccaagaaagcttcaataatgtgaagcaatggttaaatgaaattgatcgttatgcaagtgacaatgttaacaagctccttgttgggaacaagagcgacctaactgccaacaaagttgtggcaactgagacagcaaaggcatttgctgatgagatgggcatcccgttcatggagacgagtgccaaaaacgccaccaacgtggagcaggccttcatggctatggctgcatccatcaaggacaggatggccagccaaccagccgcggccaacgcaaggccagcgacggtgcagatccgcgggcaacccgtcaaccagaagacgtcttgctgctcgtcttaa

SEQ ID NO: 719 - protein, 203 aa, Zea mays
MNPEYDYLFKLLLIGDSGVGKSCLLLRFADDSYLDSYISTIGVDFKIRTVEQDGKTIKLQIWDTAGQERFRTITSSYYRGAHGIIIVYDVTDQESFNNVKQWLNEIDRYASDNVNKLLVGNKSDLTANKVVATETAKAFADEMGIPFMETSAKNATNVEQAFMAMAASIKDRMASQPAAANARPATVQIRGQPVNQKTSCCSS

SEQ ID NO: 720 - DNA, 642 bp, Triticum aestivum
  CDS (1)..(642)
atggcgtccagcgcttcccggttcatcaagtgcgtcacggtgggcgacggcgccgtcggcaagacctgcatgctcatctgctacaccagcaacaagttccccaccgactacatacccacggtgttcgacaatttcagctcaaacgtggtggcggacggcaccaccgtgaatttgggcctttgggacaccgccgggcaggaggattacaaccggctgaggcctctgagctaccgcggcgctgatgtttttgtgcttgccttctctctcgtgagccgagctagctatgagaatatcatgaagaagtggataccggagcttcagcattacgcgcccggcgtgccggttgtgctggtaggcacaaaactggatcttcgtgaagacaagcactatttgctggaccaccctggcatgatacccgttaccacagcacagggggaggaacttcgtaagcaagttggtgctttatattacatagagtgcagctcaaagacacaacagaatgtcaaagctgtgtttgatgctgctatcaaggtagtaatccagcccccaactaaacaaagagaaaagaagaaaaagaaacagcgtcggggatgttctatgatgaacttcggtggaaggaaaatgctatgcttcaaatcctga

SEQ ID NO: 721 - protein, 213 aa, Triticum aestivum
MASSASRFIKCVTVGDGAVGKTCMLICYTSNKFPTDYIPTVFDNFSSNVVADGTTVNLGLWDTAGQEDYNRLRPLSYRGADVFVLAFSLVSRASYENIMKKWIPELQHYAPGVPVVLVGTKLDLREDKHYLLDHPGMIPVTTAQGEELRKQVGALYYIECSSKTQQNVKAVFDAAIKVVIQPPTKQREKKKKKQRRGCSMMNFGGRKMLCFKS

SEQ ID NO: 722 - DNA, 594 bp, Triticum aestivum
  CDS (1)..(594)
atgagcgcgtccaggttcataaagtgcgtcaccgtgggggacggcgccgtcggcaagacttgcatgctcatctcctacacctccaacaccttccccaccgactatgtgccaacggtgtttgacaacttcagtgctaatgttgtggttgatggcaacactgtcaacctcgggctatgggatactgcaggtcaggaggactacaacagactgagaccgctgagttatcgtggagctgatgtcttccttctggccttctcgcttatcagcaaggccagctatgagaatgtttcaaagaagtggatacctgagctgaagcattatgcaccaggtgtgcctattatcctcgtgggaacaaagcttgatcttcgagatgacaagcagttctttgtggaccatcctggtgctgttcctatcactactgctcagggggaggaactaaaaaagttaataggcgcaccctactacatcgaatgcagctcgaagacccaactaaatgtcaagggtgtatttgatgcggcaataaaggtggtacttgcgccaccaaaggcgaagaagaagaaaaaggcgcagaggggggcttgctccatcttgtga

SEQ ID NO: 723 - protein, 197 aa, Triticum aestivum
MSASRFIKCVTVGDGAVGKTCMLISYTSNTFPTDYVPTVFDNFSANVVVDGNTVNLGLWDTAGQEDYNRLRPLSYRGADVFLLAFSLISKASYENVSKKWIPELKHYAPGVPIILVGTKLDLRDDKQFFVDHPGAVPITTAQGEELKKLIGAPYYIECSSKTQLNVKGVFDAAIKVVLAPPKAKKKKKAQRGACSIL

SEQ ID NO: 724 - DNA, 639 bp, Triticum aestivum
  CDS (1)..(639)
atgagcgtgaccaagttcatcaagtgcgtcacggtgggggacggcgccgtcggcaagacctgcatgctcatctgctacaccagcaacaggttccccagcgattacatccccaccgtgttcgacaacttcagcgccaacgtctccgtcgacggcaacatcgtcaacctcggcctgtgggacaccgccgggcaagaggactacagcaggctgaggccgctgagctacagaggcgccgacgtcttcgtgctcgccttctccctcatcagcagcgcaagctacgagaatgtcctcaagaagtggatgccagagctccgccggttcgcgcccaacgtccccattgttcttgttgggaccaagctagatctgcgtgaccacagagcctacctcgccgaccatcccggtgcctcagcaatcacaactgcacagggtgaagaactcaggaagcagatcggcgccgcagcttacatcgagtgcagctcgaagacgcagcagaacgtcaaggctgtcttcgacaccgccatcaaggtggtcctccaaccgccgaggaggagggaggtgatggccgccaggaagaaaaccaggcgaagctctggatgctccatcatgcacttgatgtgtggcagcacgtgtgctgcttga

SEQ ID NO: 725 - protein, 212 aa, Triticum aestivum
MSVTKFIKCVTVGDGAVGKTCMLICYTSNRFPSDYIPTVFDNFSANVSVDGNIVNLGLWDTAGQEDYSRLRPLSYRGADVFVLAFSLISSASYENVLKKWMPELRRFAPNVPIVLVGTKLDLRDHRAYLADHPGASAITTAQGEELRKQIGAAAYIECSSKTQQNVKAVFDTAIKVVLQPPRRREVMAARKKTRRSSGCSIMHLMCGSTCAA

SEQ ID NO: 726 - DNA, 594 bp, Triticum aestivum
  CDS (1)..(594)
atgagcgcttctcggttcatcaagtgcgtgacggtgggggacggcgccgtcggcaagacttgcctcctcatctcctacacatccaacaccttccccaccgactatgtcccaacagtcttcgacaacttcagcgctaacgtcgtggttgacgggagcaccgtcaacctcggattatgggatactgcaggacaagaggactataatagactacgcccactaagctaccgaggtgccgatgtcttcctgctcgccttttctcttatcagcaaagcaagctacgagaatgtcactaagaagtggatccctgagctacggcactatgctcctggtgtgcccataattcttgttgggacaaagcttgatctgcgggatgacgagcagtttttcgtggatcaccctggggctgttcctatttccaccgctcagggtgaagagctgaagaaggtaattggcgcgacggcctacatcgagtgcagctcaaaaacacagcagaacatcaaggcggtgtttgatgcggcgatcaaggtggttctccagcctccgaagcagaagcggaagaagaggaagtcgcagaaaggatgcagcatcttgtaa

SEQ ID NO: 727 - protein, 197 aa, Triticum aestivum
MSASRFIKCVTVGDGAVGKTCLLISYTSNTFPTDYVPTVFDNFSANVVVDGSTVNLGLWDTAGQEDYNRLRPLSYRGADVFLLAFSLISKASYENVTKKWIPELRHYAPGVPIILVGTKLDLRDDEQFFVDHPGAVPISTAQGEELKKVIGATAYIECSSKTQQNIKAVFDAAIKVVLQPPKQKRKKRKSQKGCSIL

SEQ ID NO: 728 - DNA, 669 bp, Triticum aestivum
  CDS (1)..(669)
atgagcggcggagcgggagcgggggcggcggcggcggcggcggtgagcaggttcatcaagtgcgtggccgtgggcgacggcgccgtgggcaagacctgcatgctcatctgctacacctgcaacaagttccccaccgactacatccccaccgtgttcgacaacttcagcgccaatgtctccgtggacggcagcatcgtcaacctcggcctctgggacaccgcaggtcaggaggattacagcaggctgaggcctctgagctacaggggagccgatgtcttcatcctctccttctccctcaccagcagagcaagctatgagaatgtgcacaagaagtggatgccggagcttcgccggtacgcccccggcattcctgtactacttgttggaaccaagttggatctccgagaagatagagcatatcttgctgatcatgcagctgattccatcataacaactgagcagggtgaggagcttcggagacaaataggtgcggtggcatacatagaatgcagctccaagacacaaaggaacattaaggctgttttcgacaccgcaatcaaggcagttcttcaacctcaaaggcacaaggaggtagccagaaaggaaattcggactcgctctagtcggtcagtaaggcgctacttctgcgggagtgtttgcttagcatag

SEQ ID NO: 729 - protein, 222 aa, Triticum aestivum
MSGGAGAGAAAAAAVSRFIKCVAVGDGAVGKTCMLICYTCNKFPTDYIPTVFDNFSANVSVDGSIVNLGLWDTAGQEDYSRLRPLSYRGADVFILSFSLTSRASYENVHKKWMPELRRYAPGIPVLLVGTKLDLREDRAYLADHAADSIITTEQGEELRRQIGAVAYIECSSKTQRNIKAVFDTAIKAVLQPQRHKEVARKEIRTRSSRSVRRYFCGSVCLA

SEQ ID NO: 730 - DNA, 660 bp, Triticum aestivum
  CDS (1)..(660)
atggactcttcttcctcgtcgacggcgtcgtcttcccaggcgcaggcgcagccggacttcgactacctgttcaagctcctcctcatcggcgactccggcgtggggaagagcagcctgctcctccgattcacatcggactccttcgaggacctatccccgaccatcggcgtcgacttcaaggtgaagatggtcaacattgccggcaagaagctcaagctcgccgtctgggacaccgctggacaggaacgatttaggaccttgaccagctcttactacagaggggcacaagggatcatcatggtgtacgatgttactcgccgagaaacattcacgaatctctctgacatatgggccaaggaaattgacctgtattcgacaaaccaggactgtataaagatgcttgtcggaaacaaagtggacaaggaaagtgagagggctgtcaccaagaaggaaggcattgactttgccagggagtatgggtgtttatttctggaatgcagtgcgaaaaccaaagtgaacgtggagcagtgctttgaggagctcgtgctgaagatattggacactccgagcctgctggcggatgcgtcgtcgggggcgaagaagaacatcttcaagcagaaggcgccagaggctgatgctgcggcgagcggctgctgttga

SEQ ID NO: 731 - protein, 219 aa, Triticum aestivum
MDSSSSSTASSSQAQAQPDFDYLFKLLLIGDSGVGKSSLLLRFTSDSFEDLSPTIGVDFKVKMVNIAGKKLKLAVWDTAGQERFRTLTSSYYRGAQGIIMVYDVTRRETFTNLSDIWAKEIDLYSTNQDCIKMLVGNKVDKESERAVTKKEGIDFAREYGCLFLECSAKTKVNVEQCFEELVLKILDTPSLLADASSGAKKNIFKQKAPEADAAASGCC

SEQ ID NO: 732 - DNA, 660 bp, Triticum aestivum
  CDS (1)..(660)
atggactcttcttcctcgtcgacggcgtcgtcctctcaggcgcaggcgcagcccgacttcgattacctgttcaagctcctcctcatcggcgactcgggcgtgggcaagagcagtctcctcctccgattcacatccgactccttcgaggacctatccccaaccatcggcgtggacttcaaggtgaagatggttaacattgccggcaagaagctcaagctcgccgtctgggacaccgctggacaggaacggtttaggaccttgaccagctcttactacagaggggcacaagggatcatcatggtgtatgatgttactcgccgagaaacattcaccaatctctctgacatatgggccaaggaaattgacctgtattcgaccaaccaggactgtataaagatgcttgtcggaaacaaagtggacaaggaaagtgagagggctgtcaccaagaaggaaggcgtcgactttgccagggagtatgggtgtttatttctggaatgcagtgcgaaaaccaaagtgaatgtggagcagtgctttgaggagcttgtgctcaagatattggacacaccgagcctgttggcggatgcatcctctggggcaaagaagaacatcttcaagcagaaggcgccagaggctgatgctgcggcgagcggctgctgttga

SEQ ID NO: 733 - protein, 219 aa, Triticum aestivum
MDSSSSSTASSSQAQAQPDFDYLFKLLLIGDSGVGKSSLLLRFTSDSFEDLSPTIGVDFKVKMVNIAGKKLKLAVWDTAGQERFRTLTSSYYRGAQGIIMVYDVTRRETFTNLSDIWAKEIDLYSTNQDCIKMLVGNKVDKESERAVTKKEGVDFAREYGCLFLECSAKTKVNVEQCFEELVLKILDTPSLLADASSGAKKNIFKQKAPEADAAASGCC

SEQ ID NO: 734 - DNA, 618 bp, Triticum aestivum
  CDS (1)..(618)
atggcggccaacgccggcaacaagatccgcaacgccaaactggttcttcttggagatgtaggcgctggcaaatccagcctggtgcttcggtttgtaaaaggacaatttgttgaattccaggaatcgacaattggagcggctttcttctctcaaaccttggctgttaatgacgagactgtgaagtttgaaatctgggatactgctgggcaggagaggtatcacagcttggcccccatgtactataggggtgctgccgcagctatagttgtctatgacatctcgaaccaggcatccttcacccgagcaaagaaatgggttcaagaacttcaagctcaaggaaaccagaatacagtagtggctcttgctggcaacaaagctgatttgctcgaggcgagggaggttcaaatagaggaagccaagacatatgcgcaggagaatggcctcttcttcatggaaacgtctgctaaaactgcaaccaatgtgaatgacatattttatgagattgcgaagagattgcttcaggggcaggcggcgcagaacccacagacggcggggatggttctctcccagagacccaatgagagagtggtcagcgcggcttcgtgctgctcctcctga

SEQ ID NO: 735 - protein, 205 aa, Triticum aestivum
MAANAGNKIRNAKLVLLGDVGAGKSSLVLRFVKGQFVEFQESTIGAAFFSQTLAVNDETVKFEIWDTAGQERYHSLAPMYYRGAAAAIVVYDISNQASFTRAKKWVQELQAQGNQNTVVALAGNKADLLEAREVQIEEAKTYAQENGLFFMETSAKTATNVNDIFYEIAKRLLQGQAAQNPQTAGMVLSQRPNERVVSAASCCSS

SEQ ID NO: 736 - DNA, 654 bp, Triticum aestivum
  CDS (1)..(654)
atggactcttcttcctcgtcgaccgcgtcgtcgtcgcaggcgcagccggactttgattacctattcaagctcctcctcatcggcgactccggcgtggggaagagcagtctcctcctccgattcacatccgactccttcgaggacctatccccgaccatcggcgtcgacttcaaggtcaagatggtcaacattgccggcaagaagctcaagctcgccgtctgggacaccgctggacaggaaagattcaggaccttgaccagctcgtactacagaggggcgcaagggatcattatggtgtacgatgttacccgccgagaaacattcacgaatctgtctgacatatgggccaaggaaattgacctgtattcgaccaatcaagactgtataaagatgcttgtcggaaacaaagtggacaaggaaagcgagagggccgtcacaaagaaggaaggcattgactttgccagggagtacggatgtctatttctggaatgcagcgcgaagaccaaggtgaacgtggagcagtgctttgaggagctcgtgctgaagatattggacacgccgagcctgttggcggatgcatcctctggggcgaagaagaacatcttcaagcagaaggcaccagaggctgatgctgcggcgagcggctgctgttga

SEQ ID NO: 737 - protein, 217 aa, Triticum aestivum
MDSSSSSTASSSQAQPDFDYLFKLLLIGDSGVGKSSLLLRFTSDSFEDLSPTIGVDFKVKMVNIAGKKLKLAVWDTAGQERFRTLTSSYYRGAQGIIMVYDVTRRETFTNLSDIWAKEIDLYSTNQDCIKMLVGNKVDKESERAVTKKEGIDFAREYGCLFLECSAKTKVNVEQCFEELVLKILDTPSLLADASSGAKKNIFKQKAPEADAAASGCC

SEQ ID NO: 738 - DNA, 618 bp, Triticum aestivum
  CDS (1)..(618)
atgagctcctccgagtacgactacctcttcaagctgctcctcatcggcgactcctccgtcggcaagtcctgcctcctcctccgcttcgccgacgatgcgtacgtcgacacctacatcagtaccatcggcgttgatttcaaaatccggaccgttgagctcgatggcaagtcggtgaagctgcagatttgggacacagcaggccaggaaaggttcaggacaataacaagcagttactaccggggagcgcatggaatcattatcgtatatgacgtgacagatagggaaagcttcaacaatgtcaagcagtggttgagtgagatcgataggtatgccagtgacagtgtgtgcaagcttctagtggggaacaaatgtgatttggtcgatagtaaggtcgtcgatacagaggaggccaaggcttttgcagaatcgttgggaatgaattttcttgagacaagtgcaaaggaagccatcaatgtggagacagctttcttaaccatgtcatcagaaatcaagaacaagatggcgagccaaccaacggcggagaggaaatcgacggtccatgttcacatgaaagggcagcccatacagcagcagaacagcagttgctgctcctcataa

SEQ ID NO: 739 - protein, 205 aa, Triticum aestivum
MSSSEYDYLFKLLLIGDSSVGKSCLLLRFADDAYVDTYISTIGVDFKIRTVELDGKSVKLQIWDTAGQERFRTITSSYYRGAHGIIIVYDVTDRESFNNVKQWLSEIDRYASDSVCKLLVGNKCDLVDSKVVDTEEAKAFAESLGMNFLETSAKEAINVETAFLTMSSEIKNKMASQPTAERKSTVHVHMKGQPIQQQNSSCCSS

SEQ ID NO: 740 - DNA, 642 bp, Triticum aestivum
  CDS (1)..(642)
atggcgtccagcgcttcccggttcatcaagtgcgtcacggtcggcgacggcgccgtcggcaagacctgcatgctcatctgctacaccagcaacaagttccccaccgactatatacccacggtgttcgacaatttcagcgcaaacgtggtggcggacggcaccaccgtgaatttgggcctttgggacaccgccgggcaggaggattacaacaggctgaggcctctgagctaccggggcgctgatgtttttgtgcttgccttctctcttgtgagccgagctagctatgagaatatcatgaagaagtggataccggagcttcagcattacgcgcccggcgtgcctgttgtgctggtaggcacaaaactggatcttcgtgaagacaagcactatttgctggaccaccctggcatgatacccgttaccacagcacagggggaggaacttcgtaagcaagtcggtgctttatattacatagagtgcagctcaaagacacaacagaatgtcaaagctgtgtttgatgctgctatcaaggtagtaatccagcccccaactaaacaaagagaaaagaagaaaaagaagcagcgtcgtggatgctctatgatgaacttcggtggaaggaaaatgctatgcttcaaatcctga

SEQ ID NO: 741 - protein, 213 aa, Triticum aestivum
MASSASRFIKCVTVGDGAVGKTCMLICYTSNKFPTDYIPTVFDNFSANVVADGTTVNLGLWDTAGQEDYNRLRPLSYRGADVFVLAFSLVSRASYENIMKKWIPELQHYAPGVPVVLVGTKLDLREDKHYLLDHPGMIPVTTAQGEELRKQVGALYYIECSSKTQQNVKAVFDAAIKVVIQPPTKQREKKKKKQRRGCSMMNFGGRKMLCFKS

SEQ ID NO: 742 - DNA, 624 bp, Triticum aestivum
  CDS (1)..(624)
atgggcacgacgccggggagcagctacgactgctccttcaaggtgctgctcatcggcgactccgccgtcggcaagagcagcctcctcgtcagcttcgtctccgccgcccccaccaacgacgacatctcccccaccataggggtggattttaaaatcaagtttctcactgttggggataagaaattgaagttgacaatatgggacaccgctggccaggagaggtttaggacaatcactagttcttactacagaggtgctcatggaattatcttagtttatgatgtcacgaagagacaaagtttcacaaatttggctgatgtatgggccaaagaaatagaaatgcactcaacaaacaaagagtgcgtcaaaatgcttgttggaaacaaagtggacaaggatgaggacagaatggtaacaacagaagaaggtcttgcctttgcacagcagtgtggatgcctttttctcgagagcagtgccaaaacaagagaaaatgtggagaaatgttttgaagagcttgcgctaaagattcttgaggttccaagtctgtcggaggaaggctcgtcggtcgtcaagaggaactcgctgaaacagaagcatgagaagagcggggggtgctgtcagtag

SEQ ID NO: 743 - protein, 207 aa, Triticum aestivum
MGTTPGSSYDCSFKVLLIGDSAVGKSSLLVSFVSAAPTNDDISPTIGVDFKIKFLTVGDKKLKLTIWDTAGQERFRTITSSYYRGAHGIILVYDVTKRQSFTNLADVWAKEIEMHSTNKECVKMLVGNKVDKDEDRMVTTEEGLAFAQQCGCLFLESSAKTRENVEKCFEELALKILEVPSLSEEGSSVVKRNSLKQKHEKSGGCCQ

SEQ ID NO: 744 - DNA, 636 bp, Glycine max
  CDS (1)..(636)
atgagttcatcttcaggtcagagcagtggctatgatctctctttcaagatcttgttgatcggagattccggtgtgggaaaaagtagcctacttgtcagctttatttcaagttctgctgaagatctttcccccaccattggtgttgattttaagatcaaaacgctcacagtaggtggcaagagattgaaattgacgatttgggatactgctgggcaggaaaggttcaggactctaaacagttcttactatagaaaagcacagggaatcattctcgtttatgatgtcacaaggagagaaacctttacaaacttatctttagtgtggtctaaagaagtggaactctattcaactaatcagaattgcgtgaagatgctagttggaaataaagttgatagagattctgaaagggttgtgagcaaagaagagggtttagcacttgccgaggagttgggatgtctgttttttgaatgtagtgccaaaactcgagaaaatgtggagcggtgcttcgaggaacttgcactaaagataatggaagttcctagtcttttggaagaaggatctacagcagttaaaaggaatattctaaagcaacaacaacaaccccaagcatccgaatttggtggttgttgctcttaa

SEQ ID NO: 745 - protein, 211 aa, Glycine max
MSSSSGQSSGYDLSFKILLIGDSGVGKSSLLVSFISSSAEDLSPTIGVDFKIKTLTVGGKRLKLTIWDTAGQERFRTLNSSYYRKAQGIILVYDVTRRETFTNLSLVWSKEVELYSTNQNCVKMLVGNKVDRDSERVVSKEEGLALAEELGCLFFECSAKTRENVERCFEELALKIMEVPSLLEEGSTAVKRNILKQQQQPQASEFGGCCS

SEQ ID NO: 746 - DNA, 663 bp, Zea mays
  CDS (1)..(663)
atgagcgcggcgacagcggcggcggcgagctcggtcaccaagttcatcaagtgcgtcacggtcggcgatggggccgtcgggaagacctgcatgctcatctgctacacctgcaacaagttccccacggattatatccccaccgtatttgacaacttcagcgccaatgtctccgtgggtgggagcatcgtcaacttgggcctctgggacacggcaggccaggaggattacagcaggttgaggcctctcagctacaggggtgctgatgtgttcatcctctccttctccctggtcagcagggcgagctatgagaacgtcctcaagaagtggatgccagagcttcgccgattttcacctactgttcctgtagttcttgttggaaccaaactagatctccgtgaagacagatcttaccttgctgaccattctgctgcttccatcatctctactgaacagggagaagagctcaggaagcagataggcgctgtggcgtacatagaatgcagctcaaagacacagaggaacgtaaaggctgtgttcgacactgcaattaaagtagtgctgcaaccaccgaggagaagagaagttaccaggaagaaaatgaagacaaggtcgaatcagtctctgagaagatacctctgtggaagcggatgtttcacatcgtaa

SEQ ID NO: 747 - protein, 220 aa, Zea mays
MSAATAAAASSVTKFIKCVTVGDGAVGKTCMLICYTCNKFPTDYIPTVFDNFSANVSVGGSIVNLGLWDTAGQEDYSRLRPLSYRGADVFILSFSLVSRASYENVLKKWMPELRRFSPTVPVVLVGTKLDLREDRSYLADHSAASIISTEQGEELRKQIGAVAYIECSSKTQRNVKAVFDTAIKVVLQPPRRREVTRKKMKTRSNQSLRRYLCGSGCFTS

SEQ ID NO: 748 - DNA, 594 bp, Zea mays
  CDS (1)..(594)
atgagcgcgtctcggttcatcaagtgcgtcaccgtgggggacggtgccgtcggaaagacctgcatgctcatctcctacacatccaacactttccccactgactatgttccaactgtgttcgacaacttcagtgccaatgttgtggttgacgggagcactgtcaacttgggtctgtgggatacagcaggacaagaagattacaatagactgcgtccgttgagctatcgtggtgctgatgtttttctgctcgccttttctcttatcagcaaagcaagctatgagaatgtctctaagaagtgggttcctgaattaaggcactatgctcctggcgtgcccataatccttggtgggacaaaacttgatctgcgtgatgataagcagttttttgttgatcaccctggtgctgttccaatttccactgcccagggcgaagagctgaggaagctaattggtgctgccgcctacatcgaatgcagttcaaaaatccagcagaacataaaagcagtgtttgacgcagcaattaaggtggttctccagccaccaaagcaaaagaagaggaagaagaaggtgcagaagggatgcaccattttgtaa

SEQ ID NO: 749 - protein, 197 aa, Zea mays
MSASRFIKCVTVGDGAVGKTCMLISYTSNTFPTDYVPTVFDNFSANVVVDGSTVNLGLWDTAGQEDYNRLRPLSYRGADVFLLAFSLISKASYENVSKKWVPELRHYAPGVPIILGGTKLDLRDDKQFFVDHPGAVPISTAQGEELRKLIGAAAYIECSSKIQQNIKAVFDAAIKVVLQPPKQKKRKKKVQKGCTIL

SEQ ID NO: 750 - DNA, 612 bp, Zea mays
  CDS (1)..(612)
atggcggccaacttcgggaacaagatccgcaacgccaagctggttcttcttggagatgtaggcgctggcaaatctagcttggttcttcggtttgtcaagggacagtttgttgaattccaggaatcaacaatcggagcagctttcttttcccagaccttagcggtaaatgatgagactgttaagtttgaaatctgggatactgctgggcaggagaggtatcatagcttggcccccatgtattataggggtgcagccgccgccattgttgtctatgacatcacaaatccggcctccttcacccgtgccaagaaatgggttcaagaacttcaagctcaaggaaatccgaatacaatagtggctcttgctggtaacaaggttgatatgctagatgcgaggcacgtggcagtagaggaagcaaagacgtatgcccaggagaacggtctcttcttcatggagacatctgctaaaactgcaatcaatgtgaatgacatattttatgagattgcaaagagattgcttcaagggcaagaggctccaagtccacaggctggaattgttctgaatcagagaccagatgagaggatggtcagcacttcctcgtgctgctcatga

SEQ ID NO: 751 - protein, 203 aa, Zea mays
MAANFGNKIRNAKLVLLGDVGAGKSSLVLRFVKGQFVEFQESTIGAAFFSQTLAVNDETVKFEIWDTAGQERYHSLAPMYYRGAAAAIVVYDITNPASFTRAKKWVQELQAQGNPNTIVALAGNKVDMLDARHVAVEEAKTYAQENGLFFMETSAKTAINVNDIFYEIAKRLLQGQEAPSPQAGIVLNQRPDERMVSTSSCCS

SEQ ID NO: 752 - DNA, 615 bp, Zea mays
  CDS (1)..(615)
atggcggcaaccgcgggcggcaacaagatccgcaacgccaagctggttcttcttggggacgtgggcgccggcaagtccagcctggtcctccggtttgtgaaaggccagttcgtcgagttccaggaatccaccatcggcgcggctttcttctcgcagaccctggcggtgaacgacgagacggtcaagttcgagatatgggacacggcggggcaggagcggtaccacagcttggctcccatgtattaccggggcgctgcggctgccatagttgtctacgacatcacgaacgcggcctcttttacgcgtgcgaagaaatgggttcaagaacttcaagcacaaggaaactcgaatacaatagtggctcttgccgggaacaaggctgatttgttagatacgaggcaggtgtcagcagatgaagcaaaggcgtatgctcaagagaatggtctcttcttcatggaaacttctgccaaaacagctaccaatgtgaacgacgtgttctatgagattgcgaagaaactgcttcaagggcagcaggttcagaacccacaaggcgggatggttctcaaccagagaccacctgagaggatggtgagctcttcttcctgctgtgcgtga

SEQ ID NO: 753 - protein, 204 aa, Zea mays
MAATAGGNKIRNAKLVLLGDVGAGKSSLVLRFVKGQFVEFQESTIGAAFFSQTLAVNDETVKFEIWDTAGQERYHSLAPMYYRGAAAAIVVYDITNAASFTRAKKWVQELQAQGNSNTIVALAGNKADLLDTRQVSADEAKAYAQENGLFFMETSAKTATNVNDVFYEIAKKLLQGQQVQNPQGGMVLNQRPPERMVSSSSCCA

SEQ ID NO: 754 - DNA, 654 bp, Zea mays
  CDS (1)..(654)
atgagcgcggcggcggcgagctcggtcaccaagttcatcaagtgcgtcacggtcggcgatggggccgtcgggaagacctgcatgctcatctgctacacctgcaacaagttccccacggattatatccccaccgtatttgacaacttcagcgccaatgtctccgtgggtgggagcatcgttaacttgggcctctgggacacggcaggccaggaggattacagcaggttgaggcctctcagctacaggggtgccgatgtgttcatcctctccttctccctggtcagcagggcgagctatgagaacgtcctcaagaagtggatgccagagcttcgccgattttcacctactgttcctgtagttcttgttggaaccaaactagatctccgtgaagacagatcttaccttgctgaccattctgctgcttccatcatctctactgaacagggagaagagctcaggaagcagataggcgctgtggcgtacatagaatgcagctcaaagacacagaggaacgtaaaggctgtgttcgacactgcaattaaagtagtgctgcaaccaccgaggagaagagaagttaccaggaagaaaatgaaggcaaggtcgaatcagtctctgagaagatacctctgtggaagcggatgtttcacatcgtaa

SEQ ID NO: 755 - protein, 217 aa, Zea mays
MSAAAASSVTKFIKCVTVGDGAVGKTCMLICYTCNKFPTDYIPTVFDNFSANVSVGGSIVNLGLWDTAGQEDYSRLRPLSYRGADVFILSFSLVSRASYENVLKKWMPELRRFSPTVPVVLVGTKLDLREDRSYLADHSAASIISTEQGEELRKQIGAVAYIECSSKTQRNVKAVFDTAIKVVLQPPRRREVTRKKMKARSNQSLRRYLCGSGCFTS

SEQ ID NO: 756 - DNA, 24 bp, Artificial sequence
  primer
atgtctgaaaaggccgttagaagg

SEQ ID NO: 757 - DNA, 26 bp, Artificial sequence
  primer
ttataaaattatgcaacagttagccc

SEQ ID NO: 758 - protein, 273 aa, Artificial sequence
  consensus sequence
  Variant (2)..(2): Xaa in position 2 is any amino acid
  Variant (4)..(4): Xaa in position 4 is any amino acid
  Variant (10)..(10): Xaa in position 10 is any amino acid
  Variant (15)..(15): Xaa in position 15 is any amino acid
  Variant (18)..(22): Xaa in position 18 to 22 is any amino acid
  Variant (23)..(25): Xaa in position 23 to 25 is any or no amino acid
  Variant (28)..(28): Xaa in position 28 is any amino acid
  Variant (29)..(31): Xaa in position 29 to 31 is any or no amino acid
  Variant (33)..(33): Xaa in position 33 is any amino acid
  Variant (38)..(38): Xaa in position 38 is any amino acid
  Variant (40)..(52): Xaa in position 40 to 52 is any amino acid
  Variant (53)..(55): Xaa in position 53 to 55 is any or no amino acid
  Variant (57)..(57): Xaa in position 57 is any amino acid
  Variant (68)..(68): Xaa in position 68 is any amino acid
  Variant (76)..(79): Xaa in position 76 to 79 is any amino acid
  Variant (81)..(84): Xaa in position 81 to 84 is any amino acid
  Variant (87)..(87): Xaa in position 87 is any amino acid
  Variant (88)..(92): Xaa in position 88 to 92 is any or no amino acid
  Variant (94)..(95): Xaa in position 94 to 95 is any amino acid
  Variant (97)..(98): Xaa in position 97 to 98 is any amino acid
  Variant (99)..(99): Xaa in position 99 is any or no amino acid
  Variant (101)..(101): Xaa in position 101 is any amino acid
  Variant (103)..(104): Xaa in position 103 to 104 is any amino acid
  Variant (106)..(113): Xaa in position 106 to 113 is any amino acid
  Variant (114)..(118): Xaa in position 114 to 118 is any or no amino acid
  Variant (120)..(121): Xaa in position 120 to 121 is any amino acid
  Variant (125)..(125): Xaa in position 125 is any amino acid
  Variant (127)..(127): Xaa in position 127 is any amino acid
  Variant (131)..(139): Xaa in position 131 to 139 is any amino acid
  Variant (140)..(172): Xaa in position 140 to 172 is any or no amino acid
  Variant (174)..(181): Xaa in position 174 to 181 is any amino acid
  Variant (183)..(183): Xaa in position 183 is any amino acid
  Variant (184)..(184): Xaa in position 184 is any or no amino acid
  Variant (186)..(186): Xaa in position 186 is any amino acid
  Variant (190)..(198): Xaa in position 190 to 198 is any amino acid
  Variant (201)..(202): Xaa in position 201 to 202 is any amino acid
  Variant (204)..(216): Xaa in position 204 to 216 is any amino acid
  Variant (217)..(272): Xaa in position 217 to 272 is any or no amino acid
KXVXVGDGAXGKTCXLIXXXXXXXXFPXXXXYXPTVFXNXXXXXXXXXXXXXXXXLXLWDTAGQEDYXRLRPLSYXXXXVXXXXFSXXXXXXSXXNXXXKXWXXEXXXXXXXXXXXXXPXXLVGXKXDLRXXXXXXXXXXXXXXXXXXXXXXXXXXXXXXXXXXXXXXXXXXGXXXXXXXXAXXYXECSXXXXXXXXXVFXXAXXXXXXXXXXXXXXXXXXXXXXXXXXXXXXXXXXXXXXXXXXXXXXXXXXXXXXXXXXXXXXXXXXXXXC

SEQ ID NO: 759 - protein, 19 aa, Saccharomyces cerevisiae
  protein pattern
  Variant (2)..(2): Xaa in position 2 is any amino acid
  Variant (3)..(4): Xaa in position 3 to 4 is any or no amino acid
  Variant (6)..(9): Xaa in position 6 to 9 is any amino acid
  Variant (10)..(10): Xaa in position 10 is any or no amino acid
  Variant (12)..(12): Xaa in position 12 is Ala, Gly, Gln or Thr
  Variant (13)..(13): Xaa in position 13 is Ile, Leu or Val
  Variant (14)..(14): Xaa in position 14 is Phe or Trp
VXXXGXXXXXLXXXDTAGQ

SEQ ID NO: 760 - protein, 17 aa, Saccharomyces cerevisiae
  protein pattern
  Variant (4)..(4): Xaa in position 4 is Ala or Ser
  Variant (5)..(8): Xaa in position 5 to 8 is any amino acid
  Variant (9)..(9): Xaa in position 9 is Gly or Asn
  Variant (10)..(10): Xaa in position 10 is Ile, Leu or Val
  Variant (11)..(12): Xaa in position 11 to 12 is any amino acid
  Variant (15)..(15): Xaa in position 15 is Asp, Glu, Gln or Arg
  Variant (16)..(16): Xaa in position 16 is any amino acid
ECSXXXXXXXXXVFXXA

SEQ ID NO: 761 - protein, 12 aa, Saccharomyces cerevisiae
  protein pattern
  Variant (3)..(3): Xaa in position 3 is Glu, Gly, Ser or Thr
  Variant (4)..(4): Xaa in position 4 is any amino acid
  Variant (6)..(6): Xaa in position 6 is any amino acid
  Variant (11)..(11): Xaa in position 11 is Asp or Glu
FPXXYXPTVFXN

SEQ ID NO: 762 - DNA, 579 bp, Artificial Sequence
  YNL090W codon optimized ORF
  CDS (1)..(579)
atgagcgaaaaggcagtccgcagaaaactagtgattataggagacggtgcttgcggtaagacctcacttctttacgtgtttaccttgggcaaattccctgaacagtatcatccaacagtcttcgagaactacgtaacagattgcagagtggacgggattaaggtttcccttactctttgggatactgctggacaagaagagtatgaacgacttaggccattttcgtattcgaaggctgatataatccttatcggattcgctgtcgataactttgagtctctgattaacgctagaacaaagtgggctgatgaagctcttagatactgtccagatgctcctattgttcttgttggactcaagaaagacctgagacaagaagctcacttcaaggaaaacgctactgacgaaatggtgccaattgaagatgcaaagcaagttgcaagagctataggagcgaagaaatatatggaatgttctgctctaaccggtgaaggtgttgatgatgttttcgaggttgctactagaacgtctctcctaatgaagaaagaaccaggagccaactgttgtataatcctctag

SEQ ID NO: 763 - protein, 192 aa, Artificial Sequence; identical to SEQ ID NO: 51
  Synthetic Construct

SEQ ID NO: 764 - DNA, 678 bp, Salmonella enterica; identical to SEQ ID NO: 11

SEQ ID NO: 765 - protein, 225 aa, Salmonella enterica; identical to SEQ ID NO: 12

SEQ ID NO: 766 - DNA, 774 bp, Bradyrhizobium japonicum
atgatactgactggcagcagagggatggcaggacggcgtcggatgcgtgagagggtcaagccagcaggtgaaacacgcgcggctgacgtgctccaccggatgcgcgcagacatcatcagttgcacgctcaagcccggcgccaagctgcggttcgaggcgctacgggacatctacgcggtgagcttttcgacgctgagggaggcgctgtcgcgcctcgtggccgaagggctcgtcatcgcggaggatcagcgcggcttcgtcgtcgcgccggtttcgatcgacgatctcaacgacctcacctatgtccgcgtgctcatcgagcgcgaatgcgttgcgctcgcgatcaagaacggcgacgacgcctgggaggcggacatcatcggcgcattccaccggatggatcgcctgcagaaccggctcggctccaattattatctctcggaagaatggggcaagctccacggcgattttcatttttcgcttgttgccgcgtgcggctcgcccaacctcctggagatccgccagaagctgttcgaacgcgcgcaccgctaccgccgcatgtcctcgcaattccggaccaaatggcgcgccaaggatgtcgagcacaagatgatcatggattcggtcgtcgcgcgcgatgccgcgaaggccgaggagctgatcgagcgccatatccgcgagacgaccgacaacgtgatcaagcacgcaggccacctcttcgtcacatccgacgaggaacgcccccgccgcacaagccgggtcgccgctgaatag

SEQ ID NO: 767 - protein, 257 aa, Bradyrhizobium japonicum
MILTGSRGMAGRRRMRERVKPAGETRAADVLHRMRADIISCTLKPGAKLRFEALRDIYAVSFSTLREALSRLVAEGLVIAEDQRGFVVAPVSIDDLNDLTYVRVLIERECVALAIKNGDDAWEADIIGAFHRMDRLQNRLGSNYYLSEEWGKLHGDFHFSLVAACGSPNLLEIRQKLFERAHRYRRMSSQFRTKWRAKDVEHKMIMDSVVARDAAKAEELIERHIRETTDNVIKHAGHLFVTSDEERPRRTSRVAAE

SEQ ID NO: 768 - DNA, 672 bp, Oceanicola batsensis
atgatcttcagccgcggagagagcgaggacgcaaccgtcgtggccatgctggcctcggccctgaggcgcgatatctcgttcggcgtgctgctccccgaccagaaactcaggatcaatgcgctgcgacagcgctatggcgggtcgaaccattccatgcgcgagacgctgcggatgctgagcgccgaggggctggtcgaggcttcggcgcaacgcggcttccgcgtgacctcggcgaccgaggacgatctgcgcgacatagaactcgtacggctggagatcgagaagatcgccctcgcccgggcgctggatgccggcgatacgggctgggaggggcgggtggtcgccgcgcatcacgccttgcgcaaggcggaggagcgtgtcgcggccacacccgacgacctgaccgcgcttgaatgggacgaaaggtgccgggctttctcggccagcctgatctcggcctgtggcagcccgcggctgatcgacctgcagcgcaagttcttcgaccagagccggcggttccgcctcgccctgctgcgcgaggacgcgctcgatttcgccgcgcgccgcgacaggcaggaggcgctggtcgccgccgtgctggcacgcgatacagatgccgcgctcgcgatgctcgaaagggacatcgtcgcggaactcaggacggggcgctga

SEQ ID NO: 769 - protein, 223 aa, Oceanicola batsensis
MIFSRGESEDATVVAMLASALRRDISFGVLLPDQKLRINALRQRYGGSNHSMRETLRMLSAEGLVEASAQRGFRVTSATEDDLRDIELVRLEIEKIALARALDAGDTGWEGRVVAAHHALRKAEERVAATPDDLTALEWDERCRAFSASLISACGSPRLIDLQRKFFDQSRRFRLALLREDALDFAARRDRQEALVAAVLARDTDAALAMLERDIVAELRTGR

SEQ ID NO: 770 - DNA, 567 bp, Candida glabrata; identical to SEQ ID NO: 200

SEQ ID NO: 771 - protein, 188 aa, Candida glabrata; identical to SEQ ID NO: 201

SEQ ID NO: 772 - DNA, 564 bp, Candida albicans
atgtcagaatcagttagaagaaagctagttattgttggagacggagcgtgtggcaaaacgtcactactatatgtgtttacccttggagaattccccaccgagtaccatccaactgtgtttgaaaattatgtcactgattgtaggattgatggcaaaccagtacaattggcattatgggatactgctggtcaagaagaatatgaaagattacgaccattgagttataacaattcccatgttattttgattgcatttagtttagatacaccagattcattagataatgctagaagtaagtgggttgttgaagtgaaaaaatattgccccaatactccttatttgttatgtggtctcaaaaaggatttgagaactgacgaatctgatcgtgttaattttgtgcaattcgatatgggacaagccatggcagatgtaattggagctaaaaaatatcttgagagctcggcattgacaggcgaaggtgtcgatgatatttttgagtacgccgttcggactagtttgctaaagaatgataaagccaatacaggatgttgtaccatactataa

SEQ ID NO: 773 - protein, 187 aa, Candida albicans
MSESVRRKLVIVGDGACGKTSLLYVFTLGEFPTEYHPTVFENYVTDCRIDGKPVQLALWDTAGQEEYERLRPLSYNNSHVILIAFSLDTPDSLDNARSKWVVEVKKYCPNTPYLLCGLKKDLRTDESDRVNFVQFDMGQAMADVIGAKKYLESSALTGEGVDDIFEYAVRTSLLKNDKANTGCCTIL

SEQ ID NO: 774 - DNA, 579 bp, Strongylocentrotus purpuratus
atggctgcgattaggaaaaagttggtcatcgttggagatggtgcttgtggaaagacgcgtctgctcacagtatttagcaaagaccagtaccccggccagtcagttgagacctatgtagctgatatagaagtagatagcaaacaggttgaattagcattagtggatacagcaggtcaggaagacttcgacagactgagaccgctcttatatccagacacagacgttatactcatgtgctttgctattaacaatccagacagtttagaaaacatcccggagaaatggacaccagaggtcaagcattcctgtcccaacgtgcccatcatcctggtgggtaacaagaaggaccttcgtaacgacgacaacaccaagatggagctgcagcggaccaagaagacccccgtcacgtacaacaaaggtcaccggatggcagtcaagatcaatgctgccaagtacatggagtgttcggccgagaccaacgatggggtgagggaggtctttgaaacggccacaagggcagcactgcagagcattgagagcaagaagcgcaagaagaagctttcatgcaagatcttctaa

SEQ ID NO: 775 - protein, 192 aa, Strongylocentrotus purpuratus
MAAIRKKLVIVGDGACGKTRLLTVFSKDQYPGQSVETYVADIEVDSKQVELALVDTAGQEDFDRLRPLLYPDTDVILMCFAINNPDSLENIPEKWTPEVKHSCPNVPIILVGNKKDLRNDDNTKMELQRTKKTPVTYNKGHRMAVKINAAKYMECSAETNDGVREVFETATRAALQSIESKKRKKKLSCKIF

SEQ ID NO: 776 - DNA, 594 bp, Glycine max
atgagcgcttctaggttcatcaagtgcgtcactgttggggatggtgctgtgggcaaaacctgcttgcttatttcctacaccagcaacactttccccaccgattatgtgccgactgtttttgacaatttcagtgcaaatgtggttgtcaatgggagcattgtgaatctgggtttgtgggatactgctggacaagaggattataacagattaagacctttgagttaccgtggtgccgatgttttcatactggctttctctctcataagcaaggccagttatgaaaatgtctctaaaaagtggattccggagttgaagcattatgctcctggtgtccccattattctggttggcacaaagcttgaccttcgggatgataagcagttctgcattgaccatcctggtgccgtacctattaccacagctcagggagaagagcttaggaagctgattaatgcgccagcttacattgaatgcagttcaaaaacacaggagaacgtgaaggcagtctttgatgcagccataagagttgtccttcaaccacctaagcagaagaaaaagaagggtaaagcacaaaaggcctgttcgatattgtga

SEQ ID NO: 777 - protein, 197 aa, Glycine max; identical to SEQ ID NO: 65

SEQ ID NO: 778 - DNA, 609 bp, Artificial Sequence
  MtN3-like promotor from PAW222qcz
gaagccacgtcatgaagagtatatcatttcagtaatgttttgagacgcctctataatgctttaccaacaaaacaaaacaaaaaaaagaacatttgaaaccatttgtattaaaaaaaaaaaggtatattaggccataatattataggtaacatgaaatatcaaatgacacgcaagagttttgtcaaaaatgaaaccatcacacatcagagattatggcaaataatgttttgtgtgtctcttgcttcacccataacataagcctctataactggagagaagaaaaaaaaaagtggaggggctagggtgggaatttggaagaatacagttatattgagcattgagcaagttgatagaaagcttctcaatttgtacaaaatttgcatccacatgattattaaagacgtagacagcacttcttccttctttttttctataagtttcttatatattgttcttcatgttttaatattattactttatgtacgcgtctaacagtagtcctcccaaactgctataaatagagcctcttcaacgcacctcttggcagtacaaaaattattcatctcttctaagttctaattttctaagcattcagtaaaagaactaacc

1. A method for producing a transgenic plant cell, a plant or a part thereof with increased resistance to plant disease, pathogenic fungi and/or nematodes as compared to a corresponding non-transformed wild type control, wherein the method comprises the steps of:
a) introducing into a plant cell a polynucleotide encoding a “disease resistance conferring protein” DRCP from yeast and/or Escherichia
b) generating from the plant cell the transgenic plant expressing the polynucleotide.

2. The method according to claim 1, wherein said DRCP has an activity selected from the group consisting of:
GTPase, non-essential small GTPase,
transcription regulator gabP 3′ region, transcriptional repressor with DNA-binding Winged helix domain 35 (GntR family) and DNA-binding transcriptional dual regulator protein.

3. A method for producing a transgenic plant cell, a plant or a part thereof with increased resistance to plant disease, pathogenic fungi and/or nematodes as compared to a corresponding non-transformed wild type control by increasing or generating one or more activities selected from the group consisting of:
GTPase, non-essential small GTPase,
transcription regulator gabP 3′ region, transcriptional repressor with DNA-binding Winged helix domain 35 (GntR family) and DNA-binding transcriptional dual regulator protein.

4. The method according to claim 3 wherein the activity of at least one polypeptide comprising a polypeptide selected from the group consisting of:
(i) a polypeptide comprising a polypeptide, a consensus sequence or at least one polypeptide motif as depicted in column 5 or 7 of Table II or of Table IV, respectively; or
(ii) an expression product of a nucleic acid molecule comprising a polynucleotide as depicted in column 5 or 7 of Table I,
(iii) or a functional equivalent of (i) or (ii);
is increased or generated.

5. The method of claim 1, wherein the expression of at least one nucleic acid molecule comprising a nucleic acid molecule selected from the group consisting of:
(a) a nucleic acid molecule encoding the polypeptide shown in column 5 or 7 of Table II or comprising a polypeptide as shown in column 5 or 7 of Table II;
(b) a nucleic acid molecule shown in column 5 or 7 of Table I;
(c) a nucleic acid molecule, which, as a result of the degeneracy of the genetic code, can be derived from a polypeptide sequence depicted in column 5 or 7 of Table II and confers an increased resistance to plant disease, pathogenic fungi and/or nematodes as compared to a corresponding non-transformed wild type control, a plant or a part thereof;
(d) a nucleic acid molecule having at least 30% identity with the nucleic acid molecule sequence of a polynucleotide comprising the nucleic acid molecule shown in column 5 or 7 of Table I and confers an increased resistance to plant disease, pathogenic fungi and/or nematodes as compared to a corresponding non-transformed wild type control, a plant or a part thereof;
(e) a nucleic acid molecule encoding a polypeptide having at least 30% identity with the amino acid sequence of the polypeptide encoded by the nucleic acid molecule of (a) to (c) and having the activity represented by a polypeptide comprising a polynucleotide as depicted in column 5 of Table II and confers an increased resistance to plant disease, pathogenic fungi and/or nematodes as compared to a corresponding non-transformed wild type control plant cell, a plant or a part thereof
(f) a nucleic acid molecule which hybridizes with a nucleic acid molecule of (a) to (c) under stringent hybridization conditions and confers an increased resistance to plant disease, pathogenic fungi and/or nematodes as compared to a corresponding non-transformed wild type control plant cell, a plant or a part thereof;
(g) a nucleic acid molecule encoding a polypeptide which can be isolated with the aid of monoclonal or polyclonal antibodies made against a polypeptide encoded by one of the nucleic acid molecules of (a) to (e) and having the activity represented by the nucleic acid molecule comprising a polynucleotide as depicted in column 5 of Table I;
(h) a nucleic acid molecule encoding a polypeptide comprising the consensus sequence or one or more polypeptide motifs as shown in column 7 of Table IV and having the activity represented by a protein comprising a polypeptide as depicted in column 5 of Table II or IV;
(i) a nucleic acid molecule encoding a polypeptide having the activity represented by a protein as depicted in column 5 of Table II and confers an increased resistance to plant disease, pathogenic fungi and/or nematodes as compared to a corresponding non-transformed wild type control plant cell, a plant or a part thereof;
(j) a nucleic acid molecule which comprises a polynucleotide, which is obtained by amplifying a cDNA library or a genomic library using the primers in column 7 of Table III and having the activity represented by a protein comprising a polypeptide as depicted in column 5 of Table II, and
(k) a nucleic acid molecule which is obtainable by screening a suitable nucleic acid library under stringent hybridization conditions with a probe comprising a complementary sequence of a nucleic acid molecule of (a) or (b) or with a fragment thereof, having at least 15 nt of a nucleic acid molecule complementary to a nucleic acid molecule sequence characterized in (a) to (e) and encoding a polypeptide having the activity represented by a protein comprising a polypeptide as depicted in column 5 of Table II;
is increased or generated.

6. The method of claim 1, wherein the transgenic plant cell, plant or part thereof with increased resistance to plant disease, pathogenic fungi and/or nematodes as compared to a corresponding non-transformed wild type control is derived from a monocotyledonous plant.

7. The method of claim 1, wherein the transgenic plant cell, plant or part thereof with increased resistance to plant disease, pathogenic fungi and/or nematodes as compared to a corresponding non-transformed wild type control is derived from a dicotyledonous plant.

8. The method of claim 1, wherein the plant is selected from the group consisting of maize, wheat, rye, oat, triticale, rice, barley, soybean, peanut, cotton, oil seed rape, including canola and winter oil seed rape, corn, manihot, pepper, sunflower, flax, borage, safflower, linseed, primrose, rapeseed, turnip rape, tagetes, solanaceous plants, potato, tobacco, eggplant, tomato, Vicia species, pea, alfalfa, coffee, cacao, tea, Salix species, oil palm, coconut, perennial grass, forage crops and Arabidopsis thaliana.

9. The method of claim 1, wherein the transgenic plant cell, plant or part thereof with increased resistance to plant disease, pathogenic fungi and/or nematodes as compared to a corresponding non-transformed wild type control is derived from a gymnosperm plant, spruce, pine, or fir.

10. An isolated nucleic acid molecule comprising a nucleic acid molecule selected from the group consisting of:
(a) a nucleic acid molecule encoding the polypeptide shown in column 7 of Table II B;
(b) a nucleic acid molecule shown in column 7 of Table I B;
(c) a nucleic acid molecule, which, as a result of the degeneracy of the genetic code, can be derived from a polypeptide sequence depicted in column 5 or 7 of Table II and confers an increased resistance to plant disease, pathogenic fungi and/or nematodes as compared to a corresponding non-transformed wild type control plant cell, a plant or a part thereof;
(d) a nucleic acid molecule having at least 30% identity with the nucleic acid molecule sequence of a polynucleotide comprising the nucleic acid molecule shown in column 5 or 7 of Table I and confers an increased resistance to plant disease, pathogenic fungi and/or nematodes as compared to a corresponding non-transformed wild type control plant cell, a plant or a part thereof;
(e) a nucleic acid molecule encoding a polypeptide having at least 30% identity with the amino acid sequence of the polypeptide encoded by the nucleic acid molecule of (a) to (c) and having the activity represented by a nucleic acid molecule comprising a polynucleotide as depicted in column 5 of Table I and confers an increased resistance to plant disease, pathogenic fungi and/or nematodes as compared to a corresponding non-transformed wild type control plant cell, a plant or a part thereof;
(f) a nucleic acid molecule which hybridizes with a nucleic acid molecule of (a) to (c) under stringent hybridization conditions and confers increased resistance to plant disease, pathogenic fungi and/or nematodes as compared to a corresponding non-transformed wild type control plant cell, a plant or a part thereof;
(g) a nucleic acid molecule encoding a polypeptide which can be isolated with the aid of monoclonal or polyclonal antibodies made against a polypeptide encoded by one of the nucleic acid molecules of (a) to (e) and having the activity represented by the nucleic acid molecule comprising a polynucleotide as depicted in column 5 of Table I;
(h) a nucleic acid molecule encoding a polypeptide comprising the consensus sequence or one or more polypeptide motifs as shown in column 7 of Table IV and having the activity represented by a protein comprising a polypeptide as depicted in column 5 of Table II or IV;
(i) a nucleic acid molecule encoding a polypeptide having the activity represented by a protein as depicted in column 5 of Table II and confers an increased resistance to plant disease, pathogenic fungi and/or nematodes as compared to a corresponding non-transformed wild type control plant cell, a plant or a part thereof;
(j) a nucleic acid molecule which comprises a polynucleotide, which is obtained by amplifying a cDNA library or a genomic library using the primers in column 7 of Table III and having the activity represented by a protein comprising a polypeptide as depicted in column 5 of Table II or IV; and
(k) a nucleic acid molecule which is obtainable by screening a suitable nucleic acid library under stringent hybridization conditions with a probe comprising a complementary sequence of a nucleic acid molecule of (a) or (b) or with a fragment thereof, having at least 15 nt of a nucleic acid molecule complementary to a nucleic acid molecule sequence characterized in (a) to (e) and encoding a polypeptide having the activity represented by a protein comprising a polypeptide as depicted in column 5 of Table II;
whereby the nucleic acid molecule according to (a) to (j) is at least in one or more nucleotides different from the sequence depicted in column 5 or 7 of Table I A and which encodes a protein which differs at least in one or more amino acids from the protein sequences depicted in column 5 or 7 of Table II A.

11. A nucleic acid construct which confers the expression of the nucleic acid molecule of claim 10, comprising one or more regulatory elements, whereby expression of the nucleic acid in a host cell results in increased resistance to plant disease, pathogenic fungi and/or nematodes as compared to a corresponding non-transformed wild type control.

12. A vector comprising the nucleic acid molecule as claimed in claim 10 or the nucleic acid construct comprising said nucleic acid molecule, whereby expression of said coding nucleic acid in a host cell results in increased resistance to plant disease, pathogenic fungi and/or nematodes as compared to a corresponding non-transformed wild type control, comprising
(i) a promoter regulating constitutive expression of an operably linked polynucleotide in a plant,
(ii) a promoter regulating tissue-specific expression of an operably linked polynucleotide in a plant or
(iii) a promoter regulating expression of an operably linked polynucleotide in syncytia site of a plant upon nematode infection or
(iiii) a promoter regulating pathogen-inducible expression of an operably linked polynucleotide.

13. A host cell, which has been transformed stably or transiently with the vector as claimed in claim 12 and which shows due to the transformation an increased resistance to plant disease, pathogenic fungi and/or nematodes as compared to a corresponding non-transformed wild type control.

14. A plant tissue, propagation material, seed, harvested material or a plant comprising the host cell as claimed in claim 13.

15. The method of claim 1, whereby additionally abiotic stress resistance, water deficiency resistance, or drought resistance is conferred.

16. A host cell, plant tissue, propagation material, seed, harvested material or a plant which has been transformed stably or transiently with the nucleic acid molecule as claimed in claim 10 and which shows due to the transformation an increased resistance to plant disease, pathogenic fungi and/or nematodes and abiotic stress resistance, water deficiency resistance, or drought resistance as compared to a corresponding non-transformed wild type control.
